United States Patent Application Publication US 2025/0235397 A1 - sequence listing, part 8

SEQ ID NO: 12 - DNA, 4183453 bp, Bacillus licheniformis (residues 1-2,091,727 of 4,183,453)
  source 1..4183453: mol_type = genomic DNA
aagtctttttacgaggtttttagatatgtgtacttatcgtattgatcaatgcttttgttaatcttgcgcaaggagtcctttgtttctctgatttcattctctagccgccaaagcagttgttttaattcttcaatttgttgcttttccaccggttccacactccttttggaagatcaatcaatttgtgtatagtgaacgagtcataggtatttgatctgttaatacaagtttaaagggatttggtttctttttcaccgaaaagttgcatataaatttatgcgttacaccgcaaactttaaatagaccataacacccattttacacaacttgcgattagttctcaaatcctaatgaaacataaaatttttgtttgtttttcaaggagtcaaataaagatcgcatataaacccctttatcatcgcaagttcagttgtgttttgttcgttttgcaaccttgagtctaaagtagtaactagcggggaatagaaaaacttgagtgttcacggaacgcagatcgggtatgcgccaccgaaaaacacgcaatagaccgacacgcatttcggcccttataaaaaaccatcccttcgccttacaccgcaaaaaccgcaatttgacccgtaaaaattgaaaagaggtgttcatattgcttcctcctcattgcttttggatgcatccatatcaacacgtcagctgccggcaggtctatcccgaagttcaagtcagcgccttattgcgctcggcaaaagaagcggagagcttgatggctgacggacagagaattttaagcaggctttcagcctcgcgtactttggcccagcaaatcatgacggctgcccaaagcaaccaaaaaaataacgtgctggccgcgctcaggcaaaccggcgtccgcagccagcttgatgcctcattcgatcccgacggcattcgcatcatgctcatcagcccccgcagcagactattcctgctattgcgttggtcttagcgcaaaaaaaattccggtccctaagaaggagccggaatttttttataagagcttttgacaccaatcaacagcttcaagatagcactggtacgcttcatctttagttaagccttctgtctccggtgtgttgtcttcccattcgtttcgttcgatcgattttgcaagccgcaagatttttcggtaatcattttcttttccgagcagcgcctggcccacttcgtctgtcagcggcagttcgctgacgacttccgttagttctttgtgcagcagtgtatcgataaatgaaaacatgcctgtcagcatataagaagccggctgagggcggttcgttttttttgccagcaattcgcaaagcttcgcgcggatcagcgaaatcttgacgacttcgttcttgctggagttttgctttttcgttaaatccttaaatgagaggatgaagatccaccttttgatttctttaaatccgagaagcacgatagcctggcggatgcttttaatcttttggatcggccggttggctggagaattcaacagcttcagcagctggtaagaaagcgacaaatcgcgctctataatatttgtgacgttttcaatatcaggctgatcttcgcttaattcatgcagcagctcataataagcgtggaaatgatatgtaatgtcctgaccgtcaatcacgacaggctcgctgaagaaatagccttgaaacagatgaaatccgtcttttacagcctgctcatattcttttcgcgtctccactttttcagcgaggaacgtcaggcggtggttacggcatgatcgaaggatgctctgtctttcctgctgcgtcgttttgaaaaaatcgatcttcaaaatatcaatggatgccaaaagctgatggagcaagtccctcttcacgcgatgctttaaacaaaaatcatcgagtgcaatcgtgtagccgaggcttttcaaatgcctgcacctttcgataagctcaagggtaatcggcacatcttcaaggatttccacaacgagctgatccgggtcaaaatacgtcggcagccctgatgccaaaagaccctcggtaaaattcacgtaataccttttgccttctgtcaatttatcgattccaatgtttaaaaagctgttaatcattaattctgttgtcgcttgatcaccgtcaataccggaaaaaaagtttttctcgctttccctgtataaaagctcgtatgcgacaacttgttcttttctgttgaatattggctgtctggcaacgaataccctcattcttcttccccctagcgactgaggtgccttcgcttttaagtatatcaaataattgggcaaatcccgtctgctgtataaaaattcacccaaatttgaacttaatattgaaaaacagataatccccgaagaaattatctgtttcaatccccagttatgttaaaaactatcgtttacagagtcaaccttgatccagaccttttttcgccttgattttcgcttcgtgaatttgctgcatcttgttgttccagcaagcttcgcttaaatcgacaggatattcttcgggcttgctgatccgcttatactcttcccaaagcaaactgagattttcttgaacataccgcttaatatcctgaatgctcggattctcatagacaagctcgcctttttcaaagatcggctggtgaagatctttcgcatcaaaattcgtcacaaacttgctgataaacgtatgaacggggtgaaacatcttcagccgctcctgttcattgaccttttcatagtccaaagcgatataatcgccttctgaatgatggttcagctgattgatgattctgtacacctttttcaagcctggagtcgtcactttttccggattcgaagaaattttaatcgtgtctgccatctttccgtcttcttcgatcgaaacaagtttgtaaaccgcgccgagagccggctggtcgtaagcggtaatcagctttgtgcccacgccccagacgtcgatttttgcaccctgggctttaaggttcataatcgtgtactcatcaagatcgcttgatgcaacaacttttgtatctgtaaatccggcttcatccagcatggctctcgctttcttcgacaaataggcgaggtctccgctgtccaggcggattcccgaaaattcaatttgatcgccgaattcctttgctactttgatcgcatttggaatgccggaacgcaccgtatcatatgtatcgaccaaaaagacacattttttatgggtttccgcatattttttaaatgccgtgtactcatcgcgataggcctgtacaagcgcatgggcgtgcgtgcctgataccggaatgtcaaaccgcttgccggcgcggacattgcttgtcgcgtcgaatccgccgataatcgcggctcttgctccccacatcgccgcgtccatttcatgcgcgcgccttgttccaaattcaagcgccgtctcttctccgatcacacttttgattctcgccgcttttgtggcaatcaatgtttggtaattcacaatgttgagcagagccgtctcaatcagctgcgcttcagccaaaggcgcttcgatcctcatgatcggttcgttgccaaacacgatttcgccttcctgcatagaataaagcgaaccggtgaatctcatatcttttaaaaagccgagaaagtcatctttaaagcccagctcttcttttaaataaactaaatcgctttcagtaaatctgaaatcccgcaaaaattcaatcgctttttcaagaccggcaaaaacggcaaaaccgctgtcaaaagggagctttctgaaaaacagttcaaatacggctttcttttgatcaatgccgtcgcgccaatacgtttccgccatattaatttgatataggtctgtgtgtagtgctagactgtcgtctgtaaaacggtgttccaaccttcatttctccttcctcaatctgacactgaggctcccagggtgtttgcaaaatgagaaagagcccagtcgtgtccgtccgggttaaagctagccactgcgttttgatgaatgacaagattaaaccctttattataagcatctactgcggtatggagcacgcatatatctgtgcatacgccaacaaggtgcagttcttgaatatccctttcacgaagcttcagctcgaggtttgtcccggcaaaagcagagtaccttgttttttccatgtaatagacattctgatcgtgttcgtgttttcgataaagcttttcaagcttcccgtataaatcctgtcctgatgtaccttttatattatgcggaggaaacaaacgggtttccggatgaagcgtatcgccggcctcgtgtgaatcgactgcaaatacgacataatcgccgttttgaataaacgtatccgcgagacgcgccacggcgtcttcgattttgcggccgggttccccgcacgtcagcttaccgtcagctgcgacaaagtcattcgtataatctatacatataagagcttttttcattgccgccctccccgccttttgtatgataggtaacattataacttatctaaacggacaagtgaatggcgaatcaatcgaatatggctgtcaagccgcgccagcagcggttttttctttttcagaaaaaaacaaaaaccacgggttcgggaccgccttgcggaaggcgcgtgcgaaaacccgcacctcatctcttgtttaaaaccgactgctcaaagatatcgtcctgaacataaatcgattctttctctacggcctcacgcgccgcgagaacaagtccaaggggagtgtccgattgctgatcggacacgatcgaaaaagggacgccttgcttattggactccttgatgtaaggagataaatgagagtagccgatttcgccgttaagcaataatgttgcatccgcttttgagccaagcgcatcgatgacttcccggtatgccttcggacgcagcacttgtcctttagtcaatgcgatgatgaccctttccctcagcgagcctaaaaacagtctgcgttcatccggcttcgtttcgcgtggtccgtacattccctgctgtaaatattgatccaatgattggtcgctcacgtcttagaccctccagttttatcctgctggcagcgttttttaagctgcatttttttatcagtatgcccacgaaaacagcgggcatgagcccgtgctacatttcggtcacccattgtacgatctttttggacagctcctcggccgcatccgactcagccactttcgacaatgaccggtcaagcttttcggcgagttctgctttttcttcctcataggaaatcagcgtgctccactccagttgcggcacagccacaagcgtatgaaattcctttttattttcatggaggtaaacgtctgtgatcatctgatcttcgtttaagatgtttgccttcctgattttcatctttgtcacctgccttatctatcttttttcccattatactataaaaaagaaacagcctctttaaaagaggctgtcacaggttcaatgactgggaaccgtccatcacatccgcatctgtgaaggtcgttttattgatatcgttatgaatcaatccgtagtcccctgtttgaaatgtgcccgctcctcctccggaggaatccgtgcacttcggggaaatcgcaaacacatctccaaaaaaggctgcgctgtcatcaacgactcgcctgataaaaatcggtccgacaattgccggcattttcacacctccgccatttaatttattagcatcatatgtgaaaatgggcaaaacgttcagacttcaggattttccgccgtttcttttttatacctctgccttaaacggacaaggcggacgatattcaatgtaaaagccttgagcagggcataagccggaacggccaggatcatgccgagaatgcctccgaagcttccggcgccgattaataaaaggatgatcgtcagcggatgcgtattcaagcggcggccgataatcagcggcgacagcagattcccgtctgtctgctgaacggcaacgacgatgatcagcgcgatcaatgctttcgtcggcgagtcgagaaatgcgataatgacggccggcgccgctccaagaaacggtccgacatatggaataatattcgtcacggcaatgatcaacccgagaatcagcgcgtatttcacaccggcgatccaaaaaccgatgaagcacgccgttccgacgaacagacaaacaatgagctgtccttgaatgtaagccgccagcgtctcgtacaaatccttaaaaatcttcagcccttcatttttatacttgtcaggcaggatcttgacagccaaattcgggaaacggtggccgtccttcagcatataaaacaggatgaacggcacggtaacagccgtgagcgcaatgttggtcacaacgccgaatacagaagtcaggctccctgtaatattttcaggcaggctcgtcaaatattcgccgattgagctttcgattttggcaaccgatacgaagtcctgattcattatccaagtgaaccactgcgaattcgacatttgcttaatgaaaatctggatctgtttcacataggaggggatgttgttgaacagatcggtaacctgctttgtaaatacaggaccgactgctgacaatacaaacccgatgaatgccacaaacaccaaatagatcagcagaatggacagcgttctcggcagctttttctcaagaagccgcacgatcggattgaatataaaatacaagattcccgcaattaaaatcggagtaaatagagtcgatgcaaatacgatgatcggttcgaaaagaaaagacacttttgtcgacacataaatgataagaagaaccaataaaatttgcagcgtccaaaaatgggtttttgattttaacaagctttgtttcctcccggcttttttcattaatctaaaaactactattcacactaacgtctgtcaactgttttccttccattcatacgaaaaagctttgacagggtttcatatttcagcgccttttgaataaaaaagattgacagctcctcctgttgtaattatcatgattacaacaggagggtggtttgatgaagatcagcagcagatttacgatagccgtacatatgttatccttgatgcacgtccgaagcgaccatttgacatcagagcaaatcgcagacagcgtcaataccaatccggtcatcatccgccaaatcagcagattgctgaaaaaagcgggcttgattgaagtaaagcgcggcacaggcggagcgcacttattacgggatgccggcgccatttctttgtatgatgtctataaagctgtcgaagttgtcggtgaaggcgaactgtttcacactcacgaaaaccccaatcctgattgctgggttggcgcgaatatccaccaggttcttgagcttgttttattaaaagcgcaaacagccatggagaatatactcaaagaaatgtctataaaggaattgactgatctgatcatccaaaaaaagaatgcttctcagtgaggcatgattttttcaactcgttgtaataactatacttacaacaagcatctggcactgtgtttttttcacctcgttgtaatattgttcattacaacggaataaaaggaggtggttccatgtgatcaacacaggcaaaatcggatttccatcacattaagggaggacttaacatgacgaatcatataaaagaaatcaactgggagcaaaacaccaactcttacattcagctcataccgaatattgagtacacaaaagtggaagacacttctttgacattacatttgctggtgtaccgcaatccaatggatgcgttatttaacaggaaaggcaatcaggaaacatacccgctgatcatttatttgcaagggtgcggatggggctggacaaaacaggatacatccgcctttatcccccaactggttccatttgtcgagcaaggatatgtcgtggcaagcgttcaatacagaggcagcggagaggcggtgtttccggctcagcttcatgatgtgaaaacagcagtccgctttttaaaagcaaatgccgcccgctataacatcgatcctgatagagtcggagtctggggggattcttcaggcggccatttggctcttttgcttggattgaccgaaggaattgaagaatttgaaggcccggacgaataccgtcatgtatcgagcaaagtcgatgcggttgcggactggttcggtccggtcgaccttctgtccatgagcaagtatccgtccatcttcgatcatgattcacccaattcaccggaatccaagctgatcggcggagctgttcaagaaaacagagtacaggcgaaacaagcgagtccgataagctatgttcacagggaagcgcctcccattctgattatgcacggggatcaggacgatgtcgtcccttatcaacaaagcgtccaattgtttgaagccttaataaaagaaggccatgatgcccttatgtataaaataaacggggccggacataacggttttacccaggctcataccctggacatcgtcaaatcgttcttccgcaaacatttaaagcctggaaaagcctgaacattgaaggccggatatccggcctatcagtgtatattcctctcttttatgaatattttctaaatttttttcagtatatcggtataaagttcaccttcagaaaataagatgaaaacgcttacaaataaaccatgaggtgaacaacgatgaaaaaactggtgctgctcatgcttgttttgctgctcgtgtatccgcatgtatcgaaagcgggaggatttaaaggaggaggcggcaatccgggctactggttcgcgggagaccctgtagaacatcccgatcccgcaaaaccgccgattgtattcgtccatggattaaacggctcttcaagcgcttggtttgacgaaaacgacatggcggaacaggcctggaaaaacgggtatgacgcggcttttatcgatctccaccccgataaagacatgcaggacaacggagcgatgctggccgccaaactgcgcgaaatctaccagtatttcggccgcaaggtgattctcgtttcctacagcaaaggcggaattgacagtcagtcggctcttattcatcacaacgcataccattatgtcgagcgggtgattacactcggaaccccccatcacggctcacagctggcagaccttgcctacagcaactgggcaggatggctagccgatattttaggccagaaaaatgacgccgtttattcactccagacagggtttatgaaatcgttccgcgaccagaccgacaatcatcccaatcgattgaaaaccaaatattttaccctggcaggcaataaaatcggcgggttcggcagcgctttatttttcgggggcgtctatttaaacatgtttggcgaaaatgacggagccgtcactgaaaaaaatgcgagactcccttacgccacaaacctggatacagggaagtgggatcacttctcaattattaaaggaaacctcacgtttcctgtattcatgcctttactgacgattcaggcaaatgcaaatgaaactgcggccaccaaagaaaacttatcgtaccctttcatcagagggggggaaaatcatggattgagagaagaggagtttgccgttgaaaaaggcgtcaaggagataaccgttcactggctgagcaatcattcctcgggaaatatcaaattgacagatccacgcggcaagccgttcaaagatttttcaatcgcaaagacggcggatgtttttgaaggggggttcgtccattccgctgccatcaaaaatcccgcggcaggcacttggaagatcgcatcatccgtcaaacaaaaagaggcgtttttgttcattgtgactttcgattctcctctaaaccagcaaatcaaaaacgcagtcaccagagaatcgtcaaaccttgcgaatgttaaggcgtccgtccgctcgatccgctacgaaaacggaaaacaagccgagaaaaagtcgctgaaacctgcttctatcaatgcgctgcaaaacagcctgtcattcaaaaaagccggcatgtactcggtgacgatagacctttcaggaaaaacggcagacaactcgccgtttaacaggacgatcatccgctctatttatgtaaatgacaaaggggaaaagtttgaaaacagccctttgtccgattaaaccgttcttttcatgggagataaggattcatcgaccatgcggtcaagcttccggattttttcaagcgccagcttatgatcgattttgcggtaatggtggtttccgcccggctcttcgtccagctcatccgcttttttgacgatttgctgcagcttgtttttatcaaggtccccttctggcaaataggaatccgtatgaagcagaatcgccaaagcaatctctttggccgctttccgatcttcgccgaggcggatgagaagcttgtgggcgcgctcggctccctttattgcgtgaatgtcgttttgcttgtatttttcataatcccattctccgtcggtgtaccattcataatggccgatatcgtgcagcaatgccgcttttgtcgcgatatcgggatctactccagctcgcaccgccaggcggtatgcgtgataggcgcaggctacagcatgagctacaccggaacgagttaaatatttttgtgcgattggatgggtgaatacatccattaaagttacgtttctcatgtaaacccctcctttatatatttttagaatcctaacatattttcatgcaaatctcaattgatctggcacatcatattcaaaattgataaataaaaaacaagcacaatcgattcgatgtgcttgtttttttattttttacaaaaactctttaatatcatacactctgccgttttcaaagtcggtctcaagcaggtcgagcagaatgccggccacataagaggtgcttctcagctttccttctgtttgataggttttgaatcgttcaatttcatgaaaatcttttttcgatgatgaacggataacctcttgcatgccggtatccatgatcccgggggagaaagaaatcatcttcaccggatcagactcatcttcctgttcaaagccgaatgttttcgtgaacatatcgagccccgcttttgagctgcagtaggcgctccatcctttataagggtttttggccgcgcctgatgatatattgacaatcgattttttgcctttatatggcttgagccatttggtaaacagctggctgagcatcaccggcgctaacaaattcaagtcataatgcagcctcagttcttccggttcagcttcgccggcgcgcttgatcggcgtcaccattcccgcattattgatcaaggtgatcgaagcaaaatcatgggcttggacagaatctgagaattgccgaaaccacttttctgtttcggcgagctgcgccagatcggcctcatgctggatcagcctgtcatgactgatatcagacttggtccttgaaacagcatgaacaatatggcctttttgcaaaagcccttcggccatcgcggcgccaagcccttttgacgctccggtaacaatggataaatgcatacggcgtccctccttatccattattgtactgattcatcagcccgcttctcaagtgctgcggttttctgcgctaagaacagccaaccaaaagacagccgcaccgacagcaccttacagaacctcggacttttcattgctgagcgctcttattttttctgctgcccgctgactttcggaatcaaaaagaacagaccggcgatgcaaagaaggatcagcagaccgtatagaatgggcaggaagatggattgccggttttccgcagagtcatcttcccttcccgataaggacggatttgccgagaatgacaggtcaagctgctttagctttgaagccacggaattgctttcattcgtgaagcttccggacaggcttttcagcttttcgatagcatcttcttttttcgaatctgtaaatgagaattccttcagttcttctggaattgatatttcctctttgtattccgcctcttcttcctgaaggtagtccgtctcgattttaatatcctgcttttcgtactcgtttggctttacatcgactttatcggtttcctccgccttcgcgatcggagtgaaaagaaagaaggagagcatgactgccatgatccccttctttccccatttcgcattacgcatcatggtcagtctcgctttcttctgttcttgattttgcaaaatcgacaataaaaggaacagcaattgcgatgatcgtgattaaaattaatgctccgattccgagtgcaaactggcttccagttccgtactgaatcgacatatatacggttgataccggattgttaaagctgaagttcggcatcgccaggtcaagcagcggcgctacatagaacagcaccatggcggctgtcgcgattccgcctgcgatcgatcccagcataaacgccgtccggataatggctgaacttgcgacaagcagcaagatcgtaaagaccgaccacatgacggcctgatcgtctgcgagtgagtaaatgttcaaaccgaacaggctgatcatcagtccgacaatgatattcaaaatgccgaacagcgcgcccctgactaagagcggagcattttgataatggtggctgaaatatccgatcagcaagctggaaagcatcacaatcacgagaatgacgaccggcggtacgttttgcgcttttgactctggaacatccccgctgattttcaccggacttgccagatgatcgtatacatatccgtcgtttcctccgaacgcatttccgagaatgccgtatacgtctccgcggataagctttgtcgtcgcgacattttgaccccagtttgaattcagggtatccgcttttttctgaacatcgtttacactttcctgaatattgctcgtgtactcgatgacgcctgattgcgtttccgacaaggaaccgagcatgttggacagctgcaaaatgtcatttccaagcgtatcctgcatgctgatgaccatcgttccatctgtcgcatctccctgcatgactgctgttccggcgccttccggattgcgcagctgttcagatacggcatttgctctgtctgagatgttgctgagctcatttagcgtttctgtttgcttttcatcaatgaatgcgccgtaactgtcaacaaaatctgtcatgccggtagtatatgcttctatatcttcgtttgtcgccagcatgttgttcttgagatttttccattttgtggtttcgttttcaccgactctgagaactgtatcaactttatttttgctattttgaagcaatccatcttcaagctctgtccctgctttgtactttccagtaacagcaacatgataaaccgatagtagattatagtaatccattagttgattaatgtttctattgacaaaagattgattgtcaaaagcccgtttcacttcagggctgatatcattctcataatacacctttaaatcttcttcgagcttaattattttaccatatattttttgaaaatccttatctctttcttcaatcagtttttgttttaaatcttcaactcgttcatttaattcatcaacttttttattcagtttttctactttttcatctaaattatcaatttttttcttaagctcttcattatgctcttttgttttttgatcaatgttagatttcacaccttctatgttagcagatatggtgcttaattcttttttcaattcttcaagattactgccgtcttgttcatcgggattttcttcagctggaggtggatcctccttatttgtatcatcaacattgtttccgttgtccgcctgctgttcattttcctcagaatttactgtgttgtcattttcacctgtttgtcctgtatctactggatctgtcgaagtattatcttctgtcgttccatcattctcaccaggtgaaggggattcaggctcttctttatttggaacctcaatgttattagacaattcctctaattcttttgatattttctcaagctcagttgtttcatcatccaaatttatttcgatattcgtattatcatcttcgtcggaatcatcttctccatcatttccagggtcttcagctatcggtgtgtcatcaaattcgaacaatttttgtcgatactctaggatatgcgactgagattcaatgttctttatgtttagttgtctagcatcagctttataattggaaatcagctcgctctggatcgtgcttatctgaccaagctgctgttctggcacttctacataacgatatttcgccagattctcaagcgaacttccagcaaggctaaactggttttgcaaaccgctgagcgacattgccatgccattcatttgttcgctgaagcggctttgggcgctggcttgcttttctttgatagatgttaggccgtcttgaatttgtttttcactgtccgcctgggccgattgaagcagctccgactgcttctcttgatattgtttgtattgattgacgttgtcgacgaagctgtccaattgttttttggattcttcgacgcttgcgttgcgttcttttgatgtgccttctgtttcattgatcgattctttcagtctgtcgatcatctctttttgtctttctacttcgccagctaaattgttggagctcggcttgtaaaaattgtacatcgcgttttggaactccgactctttgtttacgatgctgtcaaactcttttctgacctttttgactccctgtttgacaaagcgccagtacagggaagacattttcttgctcaccgttttttgcgcgtcctgaagctcgcgctggactttttccttgttgacggcgtcgagctggtcctgaattttgaattccagctccgctttttgcggacgctcatggttgtagcttaaaatgttttgcgaaaagtccgacggaatgtagacaatcgcatcgtattgcttctccgcaagtccgctttctgctgcgctccggttgacgaccgtccatttataatccggacggtcaaccagggaagccgagatttcgtttcccagcagcgcatcttgatcaacggttccgtcatctttcaaaacgccggtatcctcattgacaacggcgatttcccttgtcgcgttcgatacctttttcgtcgggttctcaccgatgaaatgaaaaaacaggacgggcagcaagatgatcgtgacgatggcgctgataattttcagcgtgcttttttgttgttccgtcatttcgctttcttcctttctacagcacataaaggaatttgaattttcctctctttgccgttttcaacgatatagccaaagcccggcagaatttccggctcctggcgttcatatgggagctgaatcaagttctgctcggattttttcatcaatagcatcgcgtgtctgacctgcttgacttcgcttgtcagcgaatcatagccttttgtgaactcgctgtgatttccggcaggtataaagtggaaacctaaatgggcgtaagatttcatgaacatcgccattttgtcctgaatcgatgcgtcgatcgtctgctggaaccgtgaaattccgtcgacaataaagaccatcggtgagaaatcaaggttggcgatttctccttgtttaacggcttccaaatacatcgcttcccttgtccggcaaatttcttccgtctcagcgagccagagcagaatgtcgtcttttgtttctagatagctgatttgatcctctgtcgcatattgagaaagccctctgtctatcgaatcaaacacggcgatttttttcgtgtcatggtcaagcaggtgctcgagcatgatcttgatgacgtttgtttttccgcgctgcgtctgacccataatgaggcagtgcttatttttctcaagattaaagtatacgggttcgacagtttcttcatcgagtcccattggaataaggcctctttcaggctgaagcggataatctctcacaaactgtgtgacggaaagctcgagcggcagcatcggcacaggcgccggctttctcatgccttccgagcgttctgcgatcgcctgaatgtcggctttgatcccttcaaacagctcgatatcgttgtccgcttccacaggcataaacatttgtgcgaagtattggttttctttattgataataacgcgtccagggatcggttcaaggctgaattccggccttccgataatcgaatatgcttcagactgatccatcagatagtggacaaccctcgttttcaggttgttcaagagcgactgtctgattgcattgacccttgtcgcggtcaggattaaataaattccaagcgactggccgtctcgtgaaaactggataaattcgctttcgagttcatgcatttcgtctttaatgatgtcaaagttgtcgaccgttatgaaaataaacggcagcttttcctcattcagcgcattgtacatcttgatatggctgatttcttttgcacggaagagatttttcctgtgctcgatttccgccttgatccggaccataaatttctcgatttttctcgtttggtccatcaggaaataatccgcggtgtgcggaagccttgcaagcggaagcagcgttccgttgccaaagtcgaaaatgtagtaatgcaattcttccggcgtatactgttcggcaaagctcatcatgaacgtcgtggctgtcagggattttccgtagcctgacgagccgacgatgccgatattgccgtcttccatcatgcggtagctgatcggctcctggctttgcttttcaggttcatcgatataggcaaagttaaaggcatcggcttcctccgacggatagcgcgttttcggtatgcgttcttcaagcggcggcagccaagggctcgggagcttctcgattcccatctccgcttgaatccgttcaatttgttcgacgactgccgaaatttccgtcacagcctcttttttcgcagcgcgatcagcatcaacatctgataaaggaattaatccggtatctgtgacgatcgccacttcatcctctgtgccatagccgtcctccatgtaaggggctccgctccatgcagactggaacagttcatacacctcgttgttgccgacttgcaaatagccgcggcccgttaccgtgatggtagccgcatccccgtttttgaggatctctttactgtcattcgcatcctgcaccttcaaggcgaccttgaatctggagttgctccaaatctggtcatcgatgatgccgcccggtttttgcgtcgccaagattaagtgcaccccgaggcttcgcccgatccttgccgcactgacaagctcgcggataaattccggttcttcgcttttcagctcggcaaattcgtctgaaattaagaaaaggtgcggcatcgccgttttcgcttttttctgtttgtaaagctttgtatagtcgttgatatggttcactttgtactgatcaaagagccgctgccttttcttcagctcgctcttaatggacgcaagcgcccggttgctgaagttcttgctgccttcaatgttagtaatcgttccgagcaaatgcggaatgttccggaacggctgcgccattccgccccctttgtagtcgattagcaaaaatgcgacttcatgcgggtgaaagtgaactgccaaagacaaaatataagtctgcaaaaattcacttttacccgaaccggtcgttccggcaagcagcccgtgggggccgtgcgccttttcgtgaaggtttaaataaacaatgtcgtcttttcctttatagccgatcggcacggccaaagatttggccgattcgcttgtcatccatttttgttcgatgccgatgtcatcgacttccttcacttggaacagttcgagaaacgatacggtatcaggaatcgaattcgtcatgcccgtctggtggtcaagcgttctcagcgtccgggaaaactgttcgttgtcttccctgttgtggtgatccagctgaaacgggatctggacggctttcttttgcttgatcagaatgtcgccttcctgttcagtaatataacgaacaagggtatgaatgttttcggacaggctttcttttgtctctgccgccacgattgtcgacactccgaggtgtttctgcttgccttccaaatattctaaaatgacgtgttctgcgatgagctgctgatttgtgatgataaacacaaagtgcggcttaaacaaagtcttctttttgttttcatctaaatcccgttctctcaaaatctcatatatgcttgaaaggagctgatctctcgtctgttcgttgtaaataaaccctttcgcataaatatgaggcatctgaaaatgcgggagccacttcatccattcccattcttgatactcggcttcgtcaaaaataaagacaaagcgcaagtcatgatagctgtggaaaaatgcgagctggccgacaagctgatgaatttcatttttgacgacggacaattttccgacgacgcccatcgggccttcggcaagattcacagtgatcggcgcatttttcagctctctgtagacctcttccattttttgcgtttgttcaaggagatggtctgtatcgcggttggccaaatctccgccgttcaaattgatttggtacgaagatgcaacatttcccgttccaaggcggatttgcagaaaatcggcgctttcaatcgatttttcccaaattcgtccgctgatctcctttgttaaatatttcattctctcaaatgtaggaaaatggaaatcaagtacgaacttttgtctttctgcaagttcatgcagctctttctttttgttttcaaggtaaagggtatagacccgctctcttttttcttctctttttttacgctgatttttgtcgcggaagtactgcacggttgacgtaatcagcgtcatcataaacatcgcaagggaaacgatgataaagatcccccgcggctgaatgagcgccacgatccccatgacgatcagcatgacgagcggaggcagaatcatcagccataggcctctgttgtctccgtcgctttcctgtgccgggaagctgaaggatactttttcatccggcaggtcgtaaatcattctcggcggcctgcggtattgcggatatttattttttgtctcggagctcggcttaagaatgttctccaaagacgtatcaaacttcccgaatccctcgatttccaagaggtcgtcttcaacgatgcgaagaatattcagtccaaatgcgatttcgtctccattttgcacggagacaggggcggacacttcttctccgttcaaataaattttcgcgtcattcggcaggacattccattgcccgtcgaggcggatgaaagagaacgtacctttttctccaaagaatgaatccgtttcattgaaataaacatccgcttcttgatcgagggaagaaatgacgatttcctgtctctctcccaaatagtaggcaggaacgctgtcggcttcttcggctaaaaagagcgtcagctgttcagcgccgctttggacggacgcctttccgccaagctttaaagaagagaccgtctcccctcccagctgcacgttcaaagcgtctgagtccttctgcttttccagtgtcaccgggcctttttcaaatgaaaaatgcttaatcgtgacagaatgtttcaaatccggcccgatggtgagcgtgcggctgttctgatcatccagttttattttttgatagtttttatgataaaaaatccataacagactcatttctccgcctcctgccaacaacaggtgttttcgcttttatttgtcatcttttttctttttgtcttccttttctttattttcttttttcgcctgttccttctcggccttctccgtttcagcctttgcggcctctacgtccgcctggttttgctcggtgtttgcctgctggttttcttcagttttggctttctgttcatccgctgtccgcttcaattcttcaagttctttttcgagcggatccagctgtttctgccgctcatcactggacaatttatcatcggctttaatgtcatctgtgtatttcataagtgccaacatgatctgtgcattgttttccagcttacgggccgtctcaagcgcttctttattggcgccgcgtccgatctgaatccagtaaaggaaattattcggatcgacttgaagcgtcaggctcttcatggcatcttcctgtaaatcggcttccttcagtacattgtcaacgatgatatacgaataagccagctgatactgaacagaatcaggcatctcatcggcatcatatttatcaagcgtactgatgactttgctgtactgtttatttaagaagtagcggttgctttcgataaacgcctgctgtttcggctgcgcgaagaataatgaatagaaggaaaataaaacagccggtattaagcataaaattagtcctaaccctatgtacctttgaatcttccatttcttcttcggaagatggacaagcattttttcttcggcatccagttcatcgatcctcttttgaatgacggctttcaaatcgccgtatgtcccgcttgtgatgatgtcttttacctgatctgaaaatttgatggtttcgctgtattttaaatactcttcaaaagaaaattgcccgtcgacagcaagcgccgcggcggctttcacttcattgaaaagtctttcttcgtcgtgttcatatggcggaatgctttctttcactccataatgtaaaaatttaggcgtcaatcctttgtcaaaaacaatgttttcaggcgcagcgatcaggtgcagccttttaattgaatgttcttcaacggctttcacgagctggtacgcgaatagccacttgctttttttatttttcccttttatataacgaaattctttatattcggaaggaggctgaatcataatttggacttcatcatcggtcatgacggcttctttattaaaggaaggatcgacttctttaatgacgtttgcttccaagccgttcacaagattgatcttctctctttgaaaacgaaagatatatgtaccgtcttctttcgtcatgacggcctctaattggtcttcgagatacgttttctttttctctgccattcatccagatcctttcataatatttccagacggtcacctgtcgtaattccgcattgcgataatgtatattcgcctgaaaaaacggcatctttatttgtcacccttacccagtagccttcccggggaggcaccggtatgcttttggcttgccacgcaatgtcgactacctttttaacagaatggtaatccgacagtctgaggtcaaagacgctgccgtcgtaatgttttaaatcgatggtaatgtcaacatacaccagttcatcacctctcaatagaaaaagcgccgtcatcttcttttgaattaggcgcttctctcattcttctaatctgtaaattagccgcggatttggctagcgatgtcttggtcagtgctttcaagagtgttagcagtctgatgaagctgtttagaaacgtcgcttagaagttcagccattttaataaaagaaggtcttagctcttggtattgctctgagaacgcacggcttgattcaccttcccacatatcttgaagctggttgatcatttgatcaagacgctgattgacctgctcagtcacatctccgctttctttttgatatctgtcagccatttgccgcagttcagccggcgtaacacgaatgattcctgacatattccttatacctcctgcgctattcgccctagatatgggctaaataacttatttttttgaacgcttttattataaaaacaagattgaggcacagtcaaacaaatctgttgttattttacaaaatgagtctaaaggtttatcattcctctatttccacccagcaaaaattatagaaatctagtaaaaatatctcaattttcttctttcggaacattcgcatcaaaaagcatggttcaatgtgactatctgagactaaagcgtttccataggataaaggaaggattgcctatgcgcaaaaaagcccgcctctcttagaggcaggcttgtcttgatcagcccgctttcaagccggctgacttttgtttttccttattatagtggtgcaaaaagaaatcgtcagtttccgcccgaatgactttccataagagcacaagggcgatcaagttcgggatcatcattaatgcgtttgccgcgtcggcaaaagcccatacagtattcaggcttgcgactgcaccgtaatatgcagcaatgacataaacgacacgataaagcggcacccattttaaaccaactaaatattccagacatttttctccatatacataccaaccgacaatggttgagtagccaaagaaaatcaccgaaaacgtgacgatgtatttgcccgcggctcccagcgaagaagcaaacgcggcgtttgtcagcgcgccggcatcaagcgatgcatcgtgggcaacaccagaaagcagaccgcctgaaggatcccagaatcccgtgataatgaggacaagccccgtcatcgtacaaacgatcaatgtaacgatgaaagttcccgtcatcgcaaccaaagcggccttgacggggtgatcggatttcgcgtttcctgcgattaaagcagcggtaccaagaccagcttcatttgaaaagattcctttcgacattccgtttctgatcgcctcagagacgaccacgccagtaaagccccccgcggctgacaccgggttgaaggcgtgataaaaaatcagctggaacgccggaatgatttgatcataatgaaggaaaataatgatcagtgatccgccgatataaagtatcgccatgaccggcacaaaaatgctcgcaaccgtgctgacacgctgaaaaccgccgaagatgatcgcagccgtcaataccgcgagcacaaggccgatgatccagccgggaatcccgaagctctgtgtaacgacttccgaaatcgtgttggactggacggaatccccgattccaaaagaggcaagcacacctgacaatgcaaataaaacggcaagcggcttccacttcttcccgagccctttttcgacatagtacatcggcccgcccgaatattcgccccgctcatttttgacgcggtatttcgtggcgagcaatgcttcgctgtattttgtagccatccctaaaagaccgacgagccacatccaaaacaaagcccccggacctccaaccgtaatcgccgtggctacaccggcaatatttccatttccgatcgttccggcaagcgttgtcatcagcgccttgaaattgctgacatcaccgtctgctccggctgattctttttctttcccgaatgcaagtttgaatgcatatatcaatcttttaaattgaagcccccgcaggatgaacgtcagaaataaaccggttcccgcaagcataacgatgcccgggactccccataaaaagccgttgattttctctagaatcgccaatgttcctactcctcttatttcagaataattaaatttggtttaatacatcgccgtgtttatgaaaaataataaatcaccagcgacttttttgttgattttaacaaacaactatattcataataaaagtaagatgggtatatgtcaaaattttttcatgcaaacataaaaagtaggggttttttatgaacaatcgaaacaatccttttaaatatcaatatgaccgtttagaagatgtggcagatcatatcagcgaggtgctggactgtccgattacgatagaagacatcaaccaccgcctccttgcttacagcacccacagcgactacacggacccggcgagaacgtcaacaatcatcggaaggcgcgttccggaaaaagtcatcaacaagctttggaaggatggaacgattcccgccttgatgaaaaccgacgaaccgatcagggtcgaacaaatcgatgaagtcggcctgtcgagccgcgtggcgatttcaatctggaaaaacagcgaggttatcggttttatctgggcgctggaaagccaaaaaacgctgtcggaagacgagcttcaccttttgaagctggccgcggattccgtaaagaacaagctgctgccttatcaggtccgaaaaagaaaaaatgaacagcgcagccaggaatttttctggaagctattgaccgggcacatttcggaagatcaggaaatctccgacggctttcaccagcttggcatcggagttccttcaacttattcggtcatcatcatccggctgaaagacgaaatcgaagaaaaaaccgaaaagcagctccattacttgctggaaacgacgcagcagctgcaaatccttctggctacaatcgactataatgagctgatcgtcctcgcttcgccaaaaacggggcaaaaagggcagccgttcaatgatttaaagcaatttgccgcgaatatacaaaagcaacttgaagagcgctataaactgaataactgcacgatcgcgatcggcggaatgtacagcttgatcacccttgtacaccagtcttatcaggaagcgctctcggcgctgaaggtcaaggagcgttttcccgatgagacaaggcacctcgtcagcttttcagagctcggcatctaccagtatctcgacgtgctcagcgaaaaacggaaacatgcaagctatccaaactattctttaatgcagcttgaagcatatgataaagagcaccactccaatcttgtcgagacgcttgaacaattcatcgaatgcgacagcaacgtcaacaccgccgcaaaaaagctgaacattcacgtcaacacgctgaattacaggctgaaacgcatcagcaaaatcgccgaaatcgatttaaaaaacatcaatgaaaaatttacgatttatcttgaaatcaagcttcgcaacatgcatttgtgaaattccacaaatgcatgtttttttatttttcgattcaaacaaagaaaattctaaaaagtcagtataaactaaagcaacagcatttttacagaaaaaggaggaatgatcggatgattatcggcgtaccgaaagaaatcaaaaacaatgaaaaccgtgttgctttgactcccggtgcggcttctcaattgatcgcggcaggacaccgcgtcatcgtggaaaaagacgcggggactggaagcgggtttgaaaatgaggattacgtctcagtgggagccgagatctcagaacaggcggaagccgtctgggaagcggctgaaatggtgatgaaagtcaaagagccgctccctgaagaatatccgtattttagagaaggtctcatcttgttcacctacctgcatttagccgcagagccttccttggctgaagcattaaagcagaaaggcgtgacagccatcgcctatgaaaccgtcagcaatggccgttcccttcctttgctgacgccgatgtctgaggtagccgggcggatggccgcccaaatcggcgcgcagttcctcgaaaagccgaaaggcggaaaaggcatattattggccggtgtacccggagtcgcgcgcgggaaagtgacgatcatcggcggaggcgttgtcggcacaaatgcggcaaaaatcgcggcgggcctcggagccgacgtgacgatgatcgatttaagcgcggatcgcctgcgccagcttgatgatcaattcggcaatcaaattaaaacattgatgtccaatccggtcaacatcgccgatgccgtagcggaagccgacctcctcatctgcgcggttctgatcccgggtgccaaagcgccgactttagtgacggaagagatggtcaaacagatgaaaccgggctctgtgattgttgacgtcgcaatcgatcaaggcggcatcgtcgagacggtggatcacatcacaacccacgacaatccgacctatgtcaaacacggagtcgtccattacgctgttgccaacatgcctggcgccgttccgcggacatctacagttgcgctgacgaatgtaacagttccgtatgcgcttgaaatcgcgaacaaaggcgcggaaaaagcgattcttgaaaaccctgcgctaaaagccggcgtcaacacagcaaacggccatattacttatgaagccgtagccagggacttaaactatggctacgttcccgcagagcttgcgatcgaaaattcgtcgtcagccgccggcgcatagcatcaaaaaaacagagcctcggaaaatatgcccgaagctctgtcttttttttatgattccgttttccggcgatcctgaatcaattttgccgcaattgcagaaacaggaaccgccccaaacaggacgattctccacagcgtccggtcagaggcatcgccgactgcggcaaacagtgccagaactgccgcagccgtcagcaataataaaacagcaaaagcctttttcttgaatgatgcaatgaaaagccaaaaacaggcgctcagcattaaaaatatgaacagctgtacgaaaaacatattcatcctccccgctaatcaaagctgtatctttcttctttccacggatttcccctaagatggtagccgtttttctcccaaaagcccggatggttttcctttgtaaactgaatgcccctcagccatttggcgcttttccaaaaatacaaatgcggcatcaccgctctgagcggaaagccgtgctccggcgtgagcggggcgccgttatgggaatgagccaaaagagacgaatccttcaaaaagtcttcgagcggaacattcgtcgtccagccttcctctgcatgcaagatgacaaatctggcttccggaagcggctttactctttcagcgatctcctttgtcttgatcccttcccaaacattatcgagcttggaccagcctgttacacaatgaatgtcattggacacttcgctttgcggcatctcatgaagatcatccaacgtcagcaggagcggctgttcgacaagtccgtaaatttgcaaattccattttgacaggtcttcgtattccggaacatgtcctgcatgaagaacaggaaaagatgttgtgacattttggtttggaggcaccctgtcggacttgtgcggttttgttttcccaaaaaacacgaaagaaccccctttgttaactcgaataaaaaatggttgacaaactattttgtgatctcttacgataaagttgtgtgaatcactgaggaggaacaaagatcatgaataataaaaaacttcgcgccggcgaaatggcgcttgtcggaatgtttgccgctctgatggggatcggcgctaatatcacttcgtttgccccgtttctgcaaatcggcggtattccgcttacgatgcagcctttcttctgtttgcttgccggacttttgctcggccgtaaattaggtgcgctgtccatgattgtctatgcgttagtcggctttattggcgctccggtattcgcttctttttcaggcggtatttccgttctttttaaaggaagcgcaggctttattctatcctatattcctgccgcatatgccgcgggctggatcacggacaaactatccgaaccgaaaacaggccactttttcgcagcctcattgatcggtacgctgatcatttatctgatcggcgtcaactatacgtatctcgctttttccacttggctcaatacaccgatgtcatattcagccgtttggaaaatgatggcctggttcttcgtgaaagacttggcattctccgttctgctcgccgcgctcgcctcaaaggttttccgggcggttcaaaaaggcgcaggcttcagaagaaatccgactttttaataaagagagcccgtggtgcggttctcattttattttaacaaacatagaaaaaaattcccctcgttttgaggggaatttttttaaagaacaatcgccgcgatccagccgaacaaaatcagcggaatattatagaagatgaatgtcggaacacaggtgtcccaaatgtggtggtgctgtccgtctgcatttaagccggatgtcggtccaagcgtgctgtcgctcgcaggtgaaccggcgtctccgagagctgcggccgtcccgataatggcgattgtcgccatcgggctgaagccaagctgcatgcaaagcggaacaaatatcgttgcgataattggaatcgtcgcaaatgaggaaccgatccccattgtgatcaataagccgacaaccagcatcagcaatgcgccgagcacctgattattgctgatgaaacctgttgacgcttcaacaagcgctttgacatcgcccgttttttcaagcacattggcaaaaccggccgcggccagcatcacaaatccgataaacgccatcatgttcatgccgttagtgatcaattcgtccgcttcgccgcgcttcatcgctccgcttaaaaacaagaccgccaaaccgctgagcgcgccgaagatcattccgtcgacgtctaagctctgagacaaatagagctgtacgcttaatgatacagcgatggccaaaacggcaatcgaaaggcttttcttcgtataggacgccgacttttgaccggcgatttccttcatttcatatgtgcggggtttgcggtacacaaaagcagcaacggccaaaccggcaatcatcccgacaatcggaatgatcatggcgattggaatatcagccaatgtgacagaaaggcctgcatctttcatattgtctttcaaaatcccctggaaaatctggccgaagccgacgggaagcaaaatatacggagctgtcaatccgaatgtcatcgcacacgcaatcaggcggcggtccacttgcagctcattcaaaattttcaataacggcggaattaaaacaggaataaatgcgatatgaaccggaacgacattttgagacatacaagaaataattaaaatcacgaagacgatcagcgcttttgaaagggttttgcgccttgtatcgccttctttgccgatcagcttgacagcagcttcaaccatggcatccggaagacccgttttcgtcaaagcgactgcaaaagcgccaaggagcgcgtagctgactgcgacggttgcgttgcctccgagtccttccgtaaatacgctgaccgtctggccgagaccgagaccgcccgtcagaccgccggcaagagcgcccacaatcagggctagaacgacattgacccgcagcaggcttaatataagcatcacaataacagcaatcacaactgcattcatatttgaaacctccgaacaaacactttagtttgctaatgtagtagataattaaagtaatgaacgtatattaccacatgttttatgaatgcgtcaatgagacatctgcgttttttccataaaaaaatccccttctagcaaaggggatgaaagactacaaatttcccgaaaaccgctcgacaaacgtgacaagcgttctcaccatcacgcccgttccgcctttcggtccaaagcatgagttttgagctgtcgttgccgttccggcgatgtcaaggtgaacccatggcgtctgctcggcgaattcgccgaggaacgttccggccataatcgcatggccttccctgcccggtgaattgttaagatcggccatttggctgttttttactctttttttgtctttttcagtaatcggaagctgccaaatcgcttctcccgcttcttcagccgcctgtctcacctgctgataaagcggatcatgatttgtcatcgctcccgtcgtttccgttcccagagctacgacgacgcctccggtcagtgtcgcgacatcgatcagcacggaagctccgtggtgcttcgcatatgtcagtccgtcagcgagcgccagccttccttcggcgtccgtattcaagatctcaatcgtcttgccgctcaaggaaacgatgacgtcgtccggcttcattgcgcttcccgaaatcatgttatcagtcgacggaatcacggcaagcacgttttgttccggcctcaattcgccgatcgcttccatcgctcccaaaacgctggcggctccgcccatatcggacttcatgccgacaatcccgctctttgtcttaatcgaatagcctccggtatcaaacgtaatccctttgccgactaaagcgatgacgtcatcccatgtttcttttccttgatatttcaagacgatcattttcggcggctcttctgatccttggttgaccgcgaggagaccgcccatcccgagctcttccatttcagccttttcaagaatttcacattcaaattcgtatttcgccgccaattcagcggcatatgacgcgagatccgccgctgtcagcatgttccccggcatgttcacgagggttctcgccgaattcgtcgcatttccgtacacctgtccgacatgcagactcgcctgaatctccttcaggtcatggtctgtcaaaacatagacgctttgcagacattgatcaggcacatttgatctgtgcttgtaatcctgcacttcatagcatgacagcatgcacgattcagccaatgcatgtgcggcgtcagcagctgggacttcttcggatacgaagctgtcgagcatgacggttaactcctgctttcgatctttgtgaatcagctgaacagcttcggcaaagcactgcttcgcatcctcgaaggtaaattccgcttcacggcccaatccgacgatataaatgcgtttgactccctgaagcgaaggggtaaatattttagacactttcgcttttttggaagatacatccccgtctttcagcagctgagaaagctggccgttcaaaaggcggtcgatttcttcagccttaccgtacagccggctttttttaaacagtccgattaaaagcgtttcttttttttcgaaatctttaaaggcataaaacatgcgttcacagctccttatcagcaaagtgagtaaaattaaaacaacaatgttataataggaaaaacattttttcccgatggggtttcatatcatatattttagcaaataactgcgtgcttttctgaattcatctctattttctttatagaaaggatgttctgcaaaatggaaatcctcacaaactttcctttgctggcgagctttgccgcgatctttttcgctcagtttatcaaggttcccatttactttgtcgtctcaaaaaaatgggattggcggcttgtcacaagcacgggcggaatgccgagttcacactcagcggccgtcacggcgctctcgaccggtgtagctcttgatcacgggatggattcttctttgttcgccgtttccgcaatatttgccgttattacgatgtttgatgcaaccggagtgagaagacatgccggagaacaagcaacagtgatcaaccggcttgtccgcgattttaaccgctttgtcaacgaagcgaaggatttccctaaaagccatcaggaagaaaaacagaaaaagctgaaggaactgctcggccatcagccgattgaagtgtttttcggcggcctgaccggcattgcactgacgctgcttctcgattatttattgatgtaaagcaaaaaaacgtttaagacgccaggtcttaaacgttttttcttattctttcgccattttatatttttgtctgaatacttgcatcgatttattttcattcagcttcaggagatcctcttcggtaatggtgccgtttccttttttaatgacataaacatcaagtgtttttttgccccattctttataaacatcctcaaccgtctcatagtacaaatcgagccggtttcccttaatggctgatccggtatccgcaacaaccccatagccgtagtccgggatgaacaatatcgtgccgatcggaaagaccgacgggtcggctgcaacggttgaatataaatctctttttactttgactcccgaatatgtaatcccgtaatcgggatgatgaggctgttttcccgttgattcagcccctgctgtatatccggtcgcggtgactttttgcttcggatacttgctccagtcaaacgcgtcttcaagcgatttcggtttgtttttaatttgttctgcggcagacagagacgtcttttccgctttttcttccggaagtgatttaaaggtgagcatcagctgtttcaaggacagatcgcgttcttttgcccagctggatatatcctgtgcctccacgcctgaaacggcaaagaaggtcgtcataaaagcaaggacaaacaaaactgtcatcaagaaacgccggaacatagtcatcacttttctcaattcttccactcctctcaccatctagttgtttccaagtggaaaaagaaatattcagatggcggaaaagttttgagaaaagtgaaaaaattaaccgcaaaaaaaaccctctcccttgaagaagaaggcttaaaacatttgatatcccctttttcgcagcgctttgatcgtaacgcccgacaacagggctccggccattccgctggctaaaatgatgatatcggcagcagccaaagaagccactctgtcaaaaaggccggaaaatgcctctcccggcgcctctacatagcgaatcagcttttctttattcacaatgaaaaggcatacaattggataaatgacagccatgatccatgacattctgagcagcatattcagcagaaaaccgatgccgaaaaacaggacgaaaaataagacaactgaaatgatgacaactggtaaactaatcaaagcctccacccccaattcacctcttttagtgtacattggggaaggaacttgagtcaatcattggaaagctgtgatgaacggtcttttcctgttcccttgcagttgctgcacgtttccgaaccgccgagcagaagctgaaaatagccttttcctgaacagaatgtacaggtagattcaagtcgatgggttgacgttgtcttcatcggatacacacctttttttcttaattttctgataatatatcatgaacgttgtcaataataaagtcagaaaatataacagatcatttgatgtaagcgcttaaaagcgaagctttctttctttttctttcgtttttgaagtttttagcctgaaataaaaagcctgcagaggaagctgcaggcttcagcgtgtcgacaaaccctcgttgtcagacctgctaagtcggtgctcatgaatagaggaaggatcggcggctaaccgcccaggcatcctgcctgaacgccgccgtcatcaccttctgtgaaagtctgatcagaaaaatttaaacttgccttttttcagaacaagtcccggcccgccgatcatgaaaagcgagcggttgtcgatgatttttttcatcatggacgccgtcgttcccgtcatctttctgccgaatgcgacgccgattgcatcgtgttcgccgagagaagcgacagagcctttgttatcaaatgagaacgtttccgtttctttgccgtgaatcagtgcggccagattgtttgcgcacgtttcgccttgctgcatggaaatctgcgcagtcggcggataaggcctttcggtttcttcatttatgattaaagagcagtctccgataacaaatatatcatcatggccttcaacgcgcaggtcaggtttaaccttcacacggccgcgcatgttttcaaagccggattcctcaatgatcgggttgccgcggacgcctgcggcccatacgacagtgcctgctttgatttcttcggtctgatcgtcttttccgacgatgattccgtcaggcgtgcattctttcacggccgtgccgattttgaattcaacgccttttccttcgaggtagttgaccgcataatcgacaagctccggttcaaagcccgggagaacagacggcgcggcttccacgcaaattaaacgaacctgctggcggtcgatatcgtattcgcggcacagctcaggaatgcggttggccatttcacctaaaaattcaatgcctgtaaaaccagctcccccgacaacgatcgtcaggcgttccgggcgcttctcggcttctgtgttatacgtcgcgaactgatattcaatgtgctcgcgaagctggcgggacgaattgatgtttgaaatagagaaagcatgctctttcaatcccgaaattccgaaagtttcagggacggagccgagcgccacgacaagatagtcgtaactaagctctcctgtttcaaggacgactttctttccttctttatcgattttctttaccgtatcctgaacgaaattgacacgggatgtattgatgacgtctttaatctgatagcggcatctgtcatgatgaagcgtacctgcgctcgcctcgtgcatccaggtcgtctcataatggtaattgtgcttgttgacaagcgtaatatccgcttcattgatgccgatttttttaacaagtctcgtaacggtcattaatccaccataacctgcacctaatactactacttttggcttattcaacggaatcacatccaccttttctgtattttactgctaagccggattaaaaatagcctttgggttatcttctgccggcttccggctttttatgaaaaaaagtttgtgaaacccttcactttagtttgccgaacaacggaatgtttttcggctgtgcgacgaaaaatattcacgaatcgttaacaatttgttcacaactacatcatagccgcttgcaattgctttttcaaggttaaatatgctctgacggtattattttccgcgcctaaaaaaacagacacgctcgtatttattttatgtgatatgatataattaagaacaattttcatttagggggcattattttcatgcgtgaagacacaaaagtatatgacatcacaattatcgggggcggccctgtcggcttgtttaccgcattttacggcggaatgcggcaagcgagcgtcaaaattattgaaagcctgccgcagctcggcggtcagctgtccgctttgtatcccgaaaaatacatatacgatgtagccgggttccctaaaatccgcgctcaggagctggtcgacaatttaaaagagcaaatggcgaaattcgatcagaccgtttgtttggaacaagccgtcgaaagcgttgaaaaacaagcagacggtattttcaaactcgtcaccaacaaagaaatccactattctaaaacggtgattattacagccggaaacggagcattccagccgagaaagctcgagcttgaatctgcggcacaattcgagaatgcaaaccttcattactttatagatgatctgaatcaatttgcgggcaagcgcgttgcggtattgggcggcggcgactccgccgtcgactgggcgctcatgctggaaccgatcgcaaaagaggtgtcaattattcatcgccgcgataaattccgcgcacacgagcacagcgtcgaaaacttgcgcaattctaaagtcaatgtattgacaccgtttgttccgaccgagctgatcggcagcgagcgaatcgaacagatcgtcattgaggaagtgaaaggcgagagaaaagaaatcatcgatgtcgacgatgtgatcgtcaacttcggttttgtttcatctctcggaccaatcaaaaactgggggcttgaaatcgagaaaaattcgatcgtcgtcaagtccacaatggaaacgaacatcgagggattctatgcagccggcgatatctgcacatatgaagggaaagtcaagctgattgcgagcggatttggtgaagcgccgaccgctgtcaacaatgcaaaagcttatatggatcctaaagcgcgtgtgcagccgctgcactctacaagcatgtttgaaaacaaataaaaatgaaaaggagcctgacaccggctccttttcattatatgatattcaaatatgagaagatcgttcccaatatcagcacaattgttaagatgccgacgactcccgccgcagtcaagacaatccggtccgtaattttctgtgattttggaagcggtttttcgcatccgcatgcctcgcagacttttgaatcgtacggcgtaagcccgccgcagcttctgcagttgattttttccatggttgaaccccttttctttactgggcttggacactaaataaacctgtccagtatagaataacaaattgacgaatagaatgtcttaagattcacaaaatattcttaaatgaactccaaaaaacccttgttaggaagtgacgatatgtcttactacaacaatcgcaatcaagagcctctgccaaaggaagatatcagtacgtgggaatgtacggctgaggactgcaacggatggatgagaaaaaatttcacgagcagcgaccgccctttatgccctctgtgcaacaaggaaatgataagcggaagccgctatatcacctctatcaccaacaacacgagcaatctgaatcgcatctttaaccagaaataaacacggttgtgttccggaagcccattgcaaaaaccttgctcaacactttgagcggggtggctgcattgctcctcttcgcgaagaagcagaaaaactatgctaaatctttcaccaatagaatctcatcccgaatcggaatgccgttatcagcgacaaagggaatttccggctttacttttcttgctttgtcaactgcgtttacatacaactcggccaaagtatagcccctcttttgataaaacataagcgcccgcatattatcgttcgtcgtgatcagtttaatcgatttacactgttttcgctttgaaacacgctccacttcttgtaaaaggagtgagccgatccctttgttttcgacaacactgtccaaagagacgacttcacattcgtttccagcgatgaagtacgtaatcaagcctttaatgtcgcttttttcatctgttacagcgaatccttccaattcatcgcagcggaatgttccgtgtgaattgaccatttccggacttccccaatgtgtatgaaaaaacgcggtaacgtccgcttttgacaaggcgtgcgttgatacgagtttcatttctttttcccccagaccataataaaacgccttttcatcacgatgaagcatcgagatgaaaggcgtttttttcattgcatatcgttgaccttatgtcagcactcttcaggcttccccgcattcgctgcggttctgaatgatgatccgcagccgcatgaagcgatggcgtttggattatcgatggtgaagcctccgcccatcatcgattgtttaaaatcaatgaccgtaccgttcatgatatccagactttcttggtctacaagcactgtgattccatgctggacgaattcattgtcgtcttcgtttttttcatgttcaaaacccatgccgtatgacaggccgctgcatccgccgccttttactccgattctcaaaaatgcgttctcctcttcatgctctttcatcatatccttgatatgaagagcagccgcttccgtaaccgtgaccgttttttcgctcatgagattacacctcctaaaagctcatgtgtacctttattataaagtcgcacgtccgatttctcaaacagaccgacttatgatataaaaaactcgccttcacataccgtttcagcgggtcccgtcatcatgacgcgtccgtcgtttttccaattaatgatcaaatcgccgccggcgagatggacggtaatgtccgtgtcccgtttggaatagccgttgagcaccgaactcactgtggctgcgcaggcgcctgttccgcaagcctgggtaattcctgatcccctttcccaaacgcggaaatggagttcattttcgttttcaacttcaacaaattctacattaaccccttccggaaacctttcatctttttcaatgagcggtcccatcgtcgtcagcggggctttttcaatatcgtctaaataaaagacgatgtggggattgcccatggatacagcggtacccttcatttcacggccgccgaatatcatcttttcattgatcgtctctgaaccctgttcaccccgcatcggcatatctgatttgagaagtcgcggttcgcccatatcgaccgtagccgatacaacttttccttcatccacctcaacctgagcctttaccaagcctgaaagggtttcaattaaaaaggacgtttcctctaccagtttatgttcatacgcgtattttgcaacgcagcgcaaaccgtttccgcagtttttgccttcagatccgtcgctgttgaaaatccgcattttaaccggcgctcgatctgaaggacagatcagaatcattccgtctgaaccgattccggtgtaaacggaagacactttgacggccaaatccgacaacagctcctcagggagatgttcttcaaactgattgacgtatatatagctgtttcctaagccgtgcattttagtaaaacgaaaagaattcatagccgcctccacatttttttctttcttctagtataaaagctgaaagggatggatacaatatggctatcccccgtttttcatacataaaagctccctgcattcatttgcagggagcttttatcatgttatccgataaacattccggcgatcgccgcgcttaaaaggttggccaatgttccggccgcaacggctttcaagccgagacgggcgatatcggaacggcggttcggcgccattcctccaagtcctccaagcaaaatcgccacagaagacaagtttgcgaaaccgcacagcgcaaagctgataatcgaagctgttttgacggaaagctgatcaaacatcggagcaaaattggaataagcgacaaattcgttcagaacgagcttttgaccgataaagcttccggcctggaccgcttcatcccatggcacgccgatgacaaaggcgagcggggcaaatacatagccgagaatatattcgagtgaaaggtctttaaagccgaaccatccgccgactcctccaagaattccgtttaaaacggcaatcaaagcaacaaaagcaagcagcatcgcgccgacattcaacgcaagagagagacccgttgatgccccttttgccgcggcatcgatgacatttgctgcgtcttcgtcttcagccatttgaatatctttttcttcaattttcggtttttccgtttcgggaatgagcatttttgccataatcaagcccgcaggtgcggccataaagctcgctgcaagcaaatattcgagaggaaccccgagaagggcgtaaccgaacaaaacagaaccggccactgaagcgagtccgcctgtcataacggcaaacagctctgactttgttaagtttgcgataaacggcttaattacaagcggcgcctcagtttgcccgacaaagatattggcagctgcagaaagagattccgttttgcttgttccgagcagttttgccaatccgccgccgatgaagcggatgatcacttgcatgattcttaaatggtaaagaactgcaatcagagatgaaaagaagatgataacaggaagaacgcttaaagcaaaggcagcactgtcgcctacttgtaagagaggcccgaagagaaagctgatgccttcattcgcataattgacgagatgctgaacggcttttgtaaaccaaagaaacgcttccctccccgtttcccatttgagaacgatgaatccgaacaggagctggatcgccaaaccgattaaaatcgttcttatgttaattttgctcttatgctcggaaagcaggaaagcaatcgcgaaaatcgccagaataccaagaagtccccataaaatgttcatgaccacacctcttattattatttaaacttttattaagatatcaattaatgattggcctgtccacaaaaattttcacgaattttttctctttttatgtaaaccctttcatttaaaggctttgcatgaaaaaacgagatcaccaagatgaccccgtttttaaatgagttcattttcatcaatgaacttgtatatattttcgaccaattcagccggattattcgctgtcaccatttctccgtttacaagagcatacatcgtctgcatgcattgtccgcagtaactcaggcagccgtattcaacgacatccaaattcggatctttctccaatatttcctttgcctcctgagaaccttgggcaagattgctgacgcaaaactcaacgattggaaacactttatttcacctcacatcgcctttttttatcgtaccctaaatgcgtttcattagtcaaagtttaaggctggagaataaagcttttgtaacatattaatactttaaagagttttactaattatcgattctaggcgttagtgtaggttattttcccgagaaatattgtgattttacatcaaattagatataattctagagggtatttacatagttttttatttttgcagtgtaaaaggtgagtttcttaatctgaggggaaaaggggaattaccaatgagaaatttagtcttgctcggcggcggatacgggaatatgcgcatcattcatcgtttgctgcctaatcagctgccagatgatgtgatgatcactttaatcgacagaaacccttaccattgtttaaaaacggagtactacgcactggctgcggggacgatttccgatcatcatatcagagtgtccttcccggatcacccgaagttaaagattgaatacgggacgatttcgtctgttgatttggaaggaaaaaaggttttgtttcatgacagggagccggtatcctatgatgacgccgtcatcggactcggctgtgaagataaatatcacaacgttcccggggcgcctgaacatacctacagcattcagacaatcgatcaatcacgcagcacgtaccaggcgctcaacaacttaaatgcggaagccaccgttgcgatcgtcggggcaggactgagcggcgttgagcttgcgagcgagctgagggaaagccgaaaagatttgaacatcatcctttttgaccggggagaattaattttgtcgagcttcccgaagcgtttgagcaaatatgtgcaaagctggtttgaagagcacggcgtcaagattatcaactgcgccaatattacaaaggtggaagaaggcatcgtctacaatcatgacgacccgatccaagccgacgccatcgtctggacagcggggatacagccgaatcaaatcgttcgggatctcgatgtggaaaaagatccgcaagggcgcgtcgtcctgacgccgcaccataacctgccgggagacgaacacgtttatgttgtcggcgactgtgcaagcctgcctcacgcgccgagcgcacagctggccgaagcccaggcggaacaaatcgtccaagtgcttgaactgcgctggaaaggcgaacctcttcctgaaacaatgccgaaattcaagctgaaaggcgtcctcgggtcgctcggcaaaaaagccggtttcggtttagttgctgaacggccgttgatcggcagagtgcctcgcctgctgaaatccggcttgctttggatgtataagcatcataatgggtaggtttgccgcgtacatgcgcgaaaccttggagttttagataaacagcgtttttctttcggggcgctctctcgccttcatgagaggatgccccttatttttgcgcttttttatttccgccaaaaagtcgagcagtccgccttatccgcaatattaaactcgatcattttctcaagcaatgaaaaatccaccggacgatcccagcggaaacggacaagctgcttcgtatgatcatagccggcctgcacaatttcctcagaaaaacgatcgatcccagcgctttcaggggcgacagccaaatgatttttcgcgacgctaaagccgataataaatgtgccgtgatcagtaaacatcggctgattccaagcgattttcggcgttaaatttggaaatgtctccgctacccaacccaatacttcttccatccgggcacgatgttccggatgatcaattcccgctaaatattcttcaaagacttccatgctgctccctcctaaaaatgattacatgctaaattgcgctgttcagtatagaatttcccctgcaatctgtctattggcatgcctcacattggcgttaagaccattataaggatttatagaatgacaagcactataaatcgggcagatttttcaataggattcgaccaaaagccggtgagcgccattcctgtcatgtgtttcatatttttaatcttcgcaagcgatttgcagggacgccggttatatttgctttcataaaaaaagcgccgctggcggcgcttttcgaagagagcttgtccggtgacaagcagggttatgcggtgttttgtcaggcggctggcgaatttccgtcaaggctgtcgagaaagatcgctctgcccgccatcagctgagccggcttatcgtcaagaaaaatggctcggccggcaaactcggcatctcccttcggctgagacgaaaaacttaaaacgacaaggcttgcaaagacggcagtcaacgcaacggcaatcatctttttcactttaactcctccgttcttttaagaatttggtctcttgcatgatgagattcttcaaaatattcggcagctttgtctgcatctccattttctttatagtaaagtgcgatatcaaatgttaattccgctacatccgtccagagattgatcgttttaagatattctaaagcatgttcaaccgcaagtggatcctgttcatcatacagagcatgaataagtttaaatttcgacaaatattccctttctcctgctttttccgcacggaaaaatcctttttcatacaatttgcgtgcttctttgacaacatttgatttgtacagcacatgtgtcagttcaaacatggaatggatgccgtaaaccgattcttcatgctctttgataagcagcgcttctttgaaatgatgttcagccaatgtgaggaggttgcgattgacatagctcaaccctaagttgtggtgagccatgccgaggaggacatgatgtttgatcagtgccgcgtctttaagggcttgcttgtaatgctgttcggcttcatcaaaacgaaataaatcgagtttatttgccccgatcagcatatcgttgctgatcgctttttgaatgtaatcatcatgtgctttgaaggtttttagagctgttttcgcatggtttaaggaaaggaaattttgtttgatttgatagtaggcgatagccagtttgtaatggaattcggcgatttcgatttgatcggggattgtcctgagcttttcctcggctaatttataataattgattgcatttgtataatccttcttatgaaattcgtacatgccagcgaaaaagaaataataatattcaatcatgtcatctgtgctttgcatatcggctttttgctcctgaatatcctcgaacagtttgttggaagcggcaaactcttctgtcagcagcttgtgccgatagtctaaaagattaaaataaagaagcagatcttgattttcttccatattcggcagctggtgctcaatgtcgcatttaatcgagaccgcttgtgatacttcgtgacgcttgatcatgacataccattgattaagcattcccgcaacttcctcatacgcaatttttgtcttcaatcgtttatccttcctttcttcccatgtcatttcctttttatgggttgtttttcattttacagaatcgcttattttttgacaatcacttttctaaatattggcataatttcctaagataactcaaaattctgacattaatcgtaacaatcttctttatttgtgcaaatctctcaggaagtattttcgtttgacatcgtttttgacggcattttataattatatatgtaaatatcaacatgtttcgatttacaataaacaaataaaggagcggttcatatgaatcaagatgtaaaagagtttgtaggaagccatatgatctatacgtatgaaaacggatgggaatatgaaatctacattaaaaatgaccataccatcgattaccgcattcacagcggaatggttgggggacgctgggttcgcgatcaaaaagccgatatcgtcaagctgactgaaggcgtctataaagtatcctggacagaaccgacagggactgacgtttccttgaacttcatgccgaatgaaaagcggatgcacggcatcatcttcttccctaaatgggttcatgaacgccctgatattacagtctgctatcaaaatgaccatatcgacttaatggaggaatcgcgcgaaaaatatgagacgtatccaaaatatgtcgtaccggaattcgccgatatcacatttattgaaaatgccggaatcgataatgaagatctgatttcaaaagccccttatcccggaatgacggatgacatcagggcaggaaagcgggtataaaagggaaagttaatgatataatgactggacttttgttaagtcatccagcagcgcttttatatcatcttgcgacaaaggtacaagcatttggtcgtagagggtgatgatctgtccgtcctcatcgtgctcatgctgccttaaatagtgctgtaaagccttgagctggttttctttcagactggtctgcgtttgaaactgcttgattttctttaatgaaaaaacattcatttcgtcatcaaaatcgcctgacatgatttgtccttcaatgcttgacatgcttgctgtccctcctaattgatctggctgatagttagtctgtccggtttaagaaaggtgcaatcataaaaaataaaacagcaaggggcatgtctgtcccttgctgtttatcatgcaggcttatatccttgcttttccatttctttatacacgtctttcagcttcggatttccttcgccgaccacttgatcaccgaccatgacgagcggataaaaatattcgtcgttcaggattttttcggagatttcctgtttttcagggtcgttttccggcggctgatggatatcaatgtacgtgattgagaaaggctggtcgggatattttcttttcagggcggcttctagccactcatacgtttcttttgatgacggaaggttcacacagcttggacaaagaacgtcggcaccgtaaacaaaaagctcggcttgttttttcatcagcggcagctcctttctctttatctttattttattctattttgtccatctgctccatattgaaatgaaaatcgttttttgtctttgccggcaaatatgatataatatgtgggaaaacgattgaaaccaaacaatagctttttattgttcgactgaatataatggttgtatgatttgaaaggagcgatacgaatgacgacagaggtcgaaatgaaagaacaagtacaggaagtgctggacaaacttcgtccgtttttactccgtgacggcggtgactgtgaactcgtcgatgttgaagacggcatcgtcaagcttcgcctgctcggcgcatgcggaagctgcccaagttccaccatcacccttaaagctggaattgagcgcgcccttttagaagaagttccgggcgtcattgaagtagagcaagtattttaatttgagaaggctgccgtaacggcagcctaaattgttgacaaaatcctaaaacggttttcagtttaggattttgtcatcctctcagcgtgattgaaaacccttgcagtctaggaaggtcgagcatcggagcggagcgaatgttggaattcgtgagcaccgacgcgcagccctgacaacgaatgcgagggtttgtcgacacgctgaggctgccgtagtgtacggcagccttttcttttttatagataagcttcaaaccagcctgcaatatactcaagccgcctgatccgctgcttcggatgcccgcttcttgataaatcgtgtgacgcgttcggaaatctgacgagttttacttctttccccatttttttcagcgccgtaaacagctgttccgcctgttcaatcgggcacctgtcgtcccgttcgccatgcagaatgagaagaggggtctccaccttgtccgcgtatttgagcggcgaatgctcccacagtttgcctggatcttcaaaaaggtctgcaccgagctgccagtctgtgaaaaaatagccgatgtcgcttaccccgtaaaaactgatccagttgaaaatggacctctgtgtcactgcggccttgaagcgcttcgtgtggccgacagcccagtttgtcataaagcccccgtagcttcctccggtgatgccgagcctttcttgatcgacgaaatcataatgttcaagcacgtggtcaacagccgccattacatccttaaaatctccaccgccgtagtcgcccctcacccggttgacaaaatcctgtccgtagccgtggcttccccgcgggttaacatatacgacggcgcttccctttgcggccagcacttgaaattcatgaaaataagcattcgcatacatggcgtgaggtccgccgtgcacttccagaatgagcggatacgtgtttcctttttcatattgggcgggctttatcagccatccgtgaattgtcagaccgtccgctgcctgaaattgaagctcctccggttccgatatgatatgttcttccgtaaacgcttggttggcatctgttagtcgctccgctttttcttcacccaattggagatggtaaagttcgctcggccggacgggcagggctatggatgccgcaaagccactttcgtccggatgcaggctgaatccgttcacatgctctttttccaaccggaccggataagcaagaccttcgattgatatgtagtaaatgcctgtagaaccctggtcagatccgatgacataaaagccgtttccgtctttggtccaggccggtttcggaagaacgcctccgacaaggctgtctcctgccaccgcatcgctgagatggacgtcaagcatttccgtcagacacgttagttttcctgtttcaatatcatacagccatgctttatcgagcgtggcgttttgatattctttctcgtttccgataaatgcaaggtgtttgccgtcaggagaaaacgatagtgaagaaaaaatgccgttttgacctgtgaggcgcttcaaatcacctgtcgaaaggttcatcaagtagacatcgttcacacgcatatccgtttgattggcgcaaaatgcaatctgatctccgcacggtgaaaatgcatggctgaaatggtcgcgttcaagatcggtcagctgtttcatttccccggtttccacttgaacgaggacaagctgcgtatactttccccttttaaacccttggccgtctgctttatatgacaaagaatcgacttccagcggttcgtggtcttcaatctcggttttcttctcatcgtcgacgctttcctcttttgtcagcttcactgaacaaagcaatgacttgccgtccggcgaccattcaggctgtgatacatcatagggaatatcggtcacttttctcgcttctcccccggcggcgcttatcacgtaaatttgtgcggtttcctcgcgattggacgtaaatgcaaggtatttgccgtccggcgaccagcggggatgctggtttctgcctttcccaaacgtccattgcaccgaagcttgtttttcgcggtcgtagatcatgatatgcgaatcatatgagtcctgtttttcgtttacttttgtttggacgtaggcgatttttgcaccatcgggcgaatactggggatcggtaatggatacaagcttgatgaggtctttttcggttatcagctgcttcatgtcgtttctcctcctcatgtctgtttgccatactactccgacttcctaaataaaaatccttgttttgaaggcaaacaaaaaaagagccgaaaaagctcttttttcgttaaacactgtttactgattttctttcaacgataatgcctgtatccgggacataaaggcagtcgacctcacagtgcggaaacttggacgcaagctggtttctcagcgcctctccttttcctttttcaataaaggaaaggatcgtcgggccggctccgcttaaagccgtcccgaacgcgccgttttggcctgcttcatgctccactttcgaaagctcagagacgagcgcccttcggtatggctggtgaaagaggtctttttgcatcatgcggccgacaagcttccaatctttcgccatcagtccggcgacgagcatattgctgaccgcgcttgcttccacggctttcggataagagaggctttcgggaagaacatcccgcgcatcttttgtcagcacttcataaaaaggaatgacgacgacgacatccaaatcgatgtctttcatagaaaccatctctgtttcatcttcctcatgaagtccgatgacaagcccgccgaaaagcgatgctccggcattgtcaggatggccttcttcaaggctcgcaaaatgaagtttctcgcggtctgaaagcttcaaatcggcaagttcgttcgccagctcaaccgcagcggcaattgcggctgcgctgctgccgagaccgcgcgcaagcggaatatcgctccacactttgacaaggcttggcggaaggtcttttccgaagtgtgcggcggtccgtttggccacctggtaaattaaattgtccgttccttcaggtattcccgctacgacttctgtttcagcttcaaaacgccactcatcatgaggaaaaacagacagtcttaaatagcgggacagcgccatgccgactgaatcaaagcccgggccaagattggccgtgcttccgggaaccgtaacggaaaacagcatgtcagcctcagtcatacacgagcggctccttttaagtgttcgagaatagcttcttcgtctgtcggcagtgtgacaggtttgatctgcgacacatcaacggctgtgttcggatctttcaggccgtttccggttaagacggcaaccactttcgcacccggctgaatctctttcgtttgcagctgtttcagcacgcccgcaatggatgcgcatgatcccggttctgcaaatacgccttcttctcttgccaggagctgataagcgtggagaatctcctcgtctgacactgcatcgattttaccgttcgattcttttgcagcgttgaccgctttatcccagctagccggatttccgattctgatcgctgtcgcaacggtttccggcttttcaattactttgtttttgacaatcggggccgcgccttccgcctgaaaacccttcatgaccggcaggcctgtgccgtttttctcatgatactctttaaagcctttccagtaagccgttatattaccggcatttccgacaggaatcgctaggatatcaggcgcttcgcccagctgttcacaaatttcaaaggaagcggttttctgtccttcaatccggtatggattcacagagttgaccagcgcaatcggctctttctcgcaaatgctgcgcaccattttcagggcatcgtcgaagtttccgtcgatcgcaatgatttctgcgccgtacatgacggcttgggccaattttccgaaggcgattttgccgtctggaataatgacgatgcacttcatgttggcgcgggccgcataagccgccgcagcagccgacgtattgccggtcgaagcgcacatgatcgtgtcattgccttcttctttcgccttggcgaccgccatgaccatcccgcggtctttaaaggagcctgtagggttgacaccctccgtcttgacataaagctcgattccgagctttttcgaaaggttttgcagataaataagcggggtatttccctcgttcagcgtcaattccggtgttttgtccgttactggcaaatattctttatattgatggatgagtcctttccacattagctccaaccgttcccttctactcgataagtgcttttcacctgatgaacaacctcaagatcgttcagcttttgcaggatatccgtaaaatcctcttctgacgtatgatgtgtcacaatgacaatctcagccaggtcgtcatggcctttaatcggaagctgaaggatcttttcaaagctgacgcctctttctgaaaaaatcgatgtgattttcgaaaacgaaccaacctggtctttgacatgaattcttaaaaactgctgggcaaagatttcagacggcgcctttatcttcttttcaaactgcggatcgacaaagctgctgccgttcacgccaagacgcatgtttttcatgacggagaccaaatctgacacgacggcggttgcagtcggcatgcttccggcgccaggtccgtaaaacatcgtttcccctacggcttcgccgtatacgtaaaccgcattgaattcattatggacggaagacagcggatgatgctccggcagcaatgtcggctggacgctcacttcgactttttgtccgtcgcgctgagcgatgccgatcagcttcatcgtatagccgagccgtttgctgaaattgatgtcttcatcagacacttgggaaatgcctttcactttgacatcgtcaaggtcgacattcattgagaaaccgagcctggccaaaatcgccatctttctcgcggcatcaagaccttcaacatcagctgtcgggtctgcttctgcgaagccgagctcctgcgcttctttcagcacctcgtcataaggcgcgttttctttgttcatcttcgttaaaataaagttggtcgttccattgacgatgcccatcatcttcgtaatccggtctgaagccagcccgtcttcaaggcttcgcaaaatcggaattccgccggcgacgctcgcttcaaaataaaggtcgcagccgttttctttcgcggcagccgtcagttccgatccatagagggcgatcaaatctttattcgctgtcacgacgtgtttcttcgcctgaagcgcgtcaagcaaatagcgtctcgtctcctcgatccccccgatgacctcgataatgacatctacttctggatcttgaatgacatcataggcttcagtcgtcagaacgtctttggaaagctcgacatccctcttcttatctttatcttttacaagaactttttgaatcgtaacagggcatccgacttggtgtgtcagcttatcctggtgatcctgaataatcttcaccacaccgctcccgactgttcctaatcctagcagccccactcgtatcgccttcaatgaaattccacctttctctctcttgtccgtcctctctgaaaggacatttgtaaacacaacgcagacatttaagttacaaacattataatgggggattctttttttgacaagatgacatttgctgaaaacaaaacgtgaaaacgctttagtcgttgatataataagattctatatattcagaaatatttttgtaagaaaatcttccgagccgctcagggcagccggaagaaacgtcaaatctcggtctttgcctgctttcctctcaggacaagcgcaatattttccgcacaaagcctcatcatggcttctctcgtttcgacggcggcgctgccgatgtgaggcagcgcggtgacttgcggcaggctgacgagcgggtgatccttttgcacaggttcttccgcaaagacgtcgagtcctgcgccggcaatatctttttcgaccagcgcttcatataaatcgtcttcattgacaacctgtcctcttgagacattgataaaaatagcggagcgcttcatctttttaaaagcgctgcggttaaacagatgcttcgtttcatgagtcagaggtgtcaggcagacaacaaaatccgcctgttcaagcagttcatcgaagggcagataggatgcgcccagttctgcttctgcatctggattgcgggtgcggttatgatataaaattttcatgccgaagcctttcgcacgccgggcgacggcttgtccgatgctccccatcccgacaatgccgatcgttttatgatggacatccgcaccggccaaaagcagaggaccccagcccgtccacttcccttgtctaatccagtcgctcgcttcgacgattctgcgggcggatgccatcagcagagcaaacgtcaaatctgccgttgactctgtcagcacgccaggcgtgttgcagcagatgacgcgatgcttttgcgcagcctccacatcgatgttgtcatagcctaccgccaagttggccacgacttttaaatgcggcgcgccttttaaaagctcctcatcaatcgtgtcggaaagcatcgtcaacagtccgtgcgccttttttgctttttctttcagaatggcgcgcggacacggttcttcttccttttcccacatttcaatatgggcttcttcttttaacgcagaaagctgttcttcaggtaattttctcgtcacatatacaaacggtttgtccatgctgcctcgttcctttctaagagtagcttccactctaagcatatcgaaaaaatccgaaaatgttaacagaagaaaagaacaccgcgaagctatggtgtccttttcagccaattgacaggcggcatgcttatcaatcctgcggatctcatgcccgccatttcttgaaagccgttcaggaattgctcatatgccggcgcctgagacaataaatagtcgagtctgctttcaaaataatggtgctctgattcaggagaaatatagtacccttcaaccgtctcaaaatagtggagcggaaacagcagcctgctgtacatcagccgcttagaaaatgaggatagcggcgcggcttgttcgtattgctgaagaaacaacatgatttcattgaagtttttcctttcgtgaaacaagcttctggcatattccgcaagatccctggccgcatgatcaaacacccattccatcgggattttaataagcggctcgcgccttaaagcctcgcaggtgagccgctgctggcaaatcgttcccgagtcagcggcctgcggctgatcatccaattcggtatctgccaaatattgaatcgcattttcggttaaaccgagataataaggaaacgattcgataaattgtttttcaaagggctgcagctgccttgcctgcgttttttgaatccagaattgttccagctggtcgagccgtttcccccaaagttctttccactgcccgatccgcgaggtttcttttacctcgtaagggtatccccttcccttgtgatgaaattcggcgagctccgcaccaaatgaaacggacctgtttgtcatgcggggagcagcttgaagaagcacatatgagacgccattctcctcaaacgtcatctccccgtcctttgtcaatataaaagatgaaacgtatgggtcgcgctgttcttgcaaatactgactcatactaaacaattccgccagctcatcctgactcaagtgggaaacagggacgatcaaaaacatcgaattcggggtatgaaaagcctgataagacaagtacgatgtaagatcgcgaatgtagattccgaatttttctttgatcagctccttcacggacatcacttcctgcaaaatttttctccttctacacatcgtaatcatgaagggattcgattatgaatcgatctggaaaaagagttctaaaatcgttacatttttaaagttgtttgtatacactaagtaaaaaaagattgggtgaaaatgatgccggaaaacaacagcatgcatcagatcgaaacagcagcaaaagaatggcttgagaaacggggcgtcaagatttcggaaattgccgatcttgtctacgtattgcagaagaaatatcatccaaacttaacaaaagaagaatgtgaagagaatgtcaaccgggtcatgaaaaaacgtgaagttcaaaacgccgtgatcacagggattcaattggatatgctgggcgagcaaagaaagctcatggaaccgctccaaaccttaatcgagacagatgaaagcctgtacggcgtcgatgaaatcttatccttctccattgtgaacttgtatggatcgattggttatacaaattatggatatattgataaaatcaaaccgggagtgctcgcacgtttaaacgataaatcaacaggcgaatgccacacgttcttggatgatatcgtcggagcgattgcggcagccgcatccagcagactggcgcatcgagcaaaagatgcggaataagccattaaaaaaacacttgtctttaaaagacaagtgttttttgcgttagacgcgatccagccattctgtcagtgaatcaatgacatatgtcggcttttcctgataggcttcaaggtgttcttttttggtcacgcccgtatgaacgagaagcgtgtccatcccggaattcattcccgccataatatccgtatcataattgtcaccgaccatcagcgtttcactgatgtctgtgccgagcaccttcatcgcctgctccatgatgatcggctccggcttgccgataaaaataggctctgtctgcgtagaaacagttaatactgacgtgagagaaccattgcctggcaagagtcctctttctgtaggaatggcgatatcgccgttagtcgagatgaatgtagcgccgttgcggatggcaagacaaccgacggctagcttttcgtatgtaatgccgcggtcgatgccgacgacgacaaagtcggcgtcttccccgccgaatgccagccctttttcctcaatggcctgacggatcccttcttcgccgatcacatatacggaagcatcgggtttttgttcggcgatgaaattggcggttgccatgctggttgtgaatacctggctctcttcggccggaatatcaaatgaaacaagcttgtccgccacttgcttcggcgtgcgcgacgagttgttcgtgacgaacagatacgggatgttccggtctttcagcttcctcacgaattcgcatgcttcttcgattttttccgtccctttgtacattgttccatcaagatcaattaagtatcctttgtatgttttcatgttgtacactccagttcgtttagtgcggtttgaatgcggataccggaccgagttcatggtttaaataatcgcggatccgcgccggaaatttctcgagcgtttccgcatgcctgctgagcagctcttccaattcttcatggttgacgttcaggtagtcttggaccaatgtcttccgataggcgatcaaatgtttcaaactgtcgccttccgcttggctgacaaccttttcatcggtcagtatatccataatgtcgtcatagcttcccggatctctcataataaagccgtcaatcatatcgttccctatatccaatatacattcgatcagcgtgtggccgattcgttcaagcgcttttttttcgacgtcggaagtccattcttcctgcatttgataaagccgcagctcctcttccaggaagttgagcgtgttttcgattttgtgtcgatcgacaaaatacatcatcagtgcatccccttttatgatcgcttattttcgcagacgttttaaaacaaagtaggcacatccgaaattgcagtactcgtaaatatattcatcaagcgtgctgatcttcgtatcaaatgtggccttttgattttgatcgtcaaaaaagcctttcagcctcagctggctgtatccccaatccccgacgatgtagtcgtatttatttaaaatgtcggagtatctggctttaaacgcttcttcgttaaaaccgtttttcacatctttgacgacttcaaatgcagcgttctgaacgacaatcattcttttcacctcttttatatgataattcaaacccgggccgccatcaattgctaagaataaatcctcccctttggaaaagctataaatgaggaggaaaagcagatgaataaaaaaattcttttagcagggctggtggcgctgcctttagcaggctgccagacggccttaaacgataccgaacacaatatatatgacgaagacggaaataccgttcacgttgcagacaagaaccctcaatatcaggaaaagttcagaaatgacaaccgaaaaggcagattcggatatgcgcgccatcaggcaacaccagtcgcaaacaaggaagaaatgcaggcgccccaaatcgaccgggaagaaatggcgcatattatatctagtttaacggttcagcttcccaatattcaagatgcgtcggcgcttgtgacagacgaagaggcgctagtcgtgtacaaaacggactccgggcagcgcaaacagacggctgatcaagtcaaaaagacggcggcatccgtcgttccgagatattaccatatctatatttccgatgatccggacatgatgcaatccgtcgctaatttcagccggcttggagccaattcaagaaacgtcgatcagctgatggccgatacaattaaggaaatgcaaaaatcgccgcaaggcaaaaccacgacaggtacagatgaaaacggaaacgaccttgacggaaaaggaaaggcgaccgaatcttgacctaaaaataagaaaaacgccagcgcatatggctggcgttttttcatccaatgttatgcctgcgcctggcgttttttagacgcttcattcacctgttcgtcggcatggtatgaagaacggacgagcggtcctgcttcacagtggctgaagcccttttccatggcgatttctttcagttcggcaaactcgtcaggatggtaatatttctgtactttaatgtgttttttggacggctgcagatactggccgattgccatgatgtcgacgttgttcgcaagaaggtcgtccattgtttcgatgatttcttcttttgtttcgccaagaccgatcatgatgctggatttcgtcgggatgtccggctgcatctctttggcgcggcgcaaaaattccaatgatctttcatatgtagctctcgcacggactctcggcgtcaggcggcggaccgtttcaatattatggtttaaaatgtccggacgcgtatccatcagcgttttcaaattattatagtctccgcccatatcggacggcagaacttcgattgttgtaaatgggctttttctccggacggcgcgtacggtttcggcgaatacccccgctcctccgtcttttaaatcgtcacgggcaacggctgtaatgaccgcgtgtttcaggttcatgatgctcacagaatctgcgactctttccggctcattcaagtcaagctctgtcggcagccccgtcttcaccgcacagaagcggcaggctctcgtacagacagatccgagaatcataaaggtcgcggtacgtctgacggcccagcattcgtggatgttcgggcattttgcctcttcgcagaccgtatggaggttgttttcccgcattaatttttttaagcccgtatagttttcattcgtgttcagcttgattttaagccattcgggctttcttaggtgctcgtctttctttgccaattccatcatctccattgtggatagtagtcatgttcaatacgaaatttgtgacatagcgccggatgagtccctctgctttggaaccgcttaaataaaaaatgctaaatcttcatctttagtcactttaacatagtacagatttgtgaacaagagcttgattagacaagatggaatttctaacattttcttattattgatttctgcagatgtcacaaactaaccgtattcaaactgaaaggagctaaggacactgtgaaagctgtattatccgttctcatcctccttttgctcatcttgcagccgtgcgctcttgcaaaggagaaaaaagagcccgatctgcaaaagagaatggccctttatcataagacagaagccgcaacccatattccttggtatgttttcgcggcagtcgaccaatacgaaatcaatatccgcaaaaaccgcaaagacttgccgaagcaaaaagggcacaccgggatatatattccgcaaagcgtgtggagcggacctgaaaaccccaatcctaaagatacatcgccgctcagcatcaaggtttttgacggaattggaatggacggaaacggagacggactcgcagaaccggatcaggatgaagacgtcctttatacgtttggacaatacttgttgacatacggaagggacattgaaaatatccgcatcggtctgtgggagttttacgaaagggatcagacggtcggcatcatatcaggctttatcaggctttttcaaaaatacggccacattgatttgggcaagcacgcctttccccttcccgtaagatcagattacagctatagaagcacatggggagatgcccgcggattcgggggcagacgcattcacgaagggacggatttgttcgcccattacggcctccccgtccggtcgacatgctacggcattgtggaaatgaaaggctggaaccgtttcggcggatggcggatcggaatcagagacatcaacaatacgtaccattatttcgctcatttgaacggtttcacaaaaggcttgaaagtgggagaaatcgtcgagcccggccaggtgatcggctcagttggagcgacgggatacgggccgccgggaacatcgggaaaattcccgccccaccttcactacggcatgtataaagacaatggaagaacagagtggtcttttgacccttatcctcatttaaaggcatgggaacggaaggaacttcgaaagaaaaaataaaagacatccctatttcaaaagaatagggatgtcttgcactttaagaggttagccggcctggcttttcttgcttttcacaaccgcattgataatgcttgcggccaatcctccccaaataatgacgatgccgatcaccatcattgctatagatgcgccgttcatgaggaaacctccttgtcatgttgaaatggcgtatatgccagcccattcttccattttgaaagcgaaaggataaatccggctgcgatcgctccaaaagcgacgcaccatccccatttcaggaggaattcaaccggcaggtcgccataggctgttgtgatattcgtcttgatattatcaaacatcatataccccagaacaatcggggtgacgacgctcaggcagattctccaccaagcgccgagctgaatgtcggaaaccgaattggcgtgagcctgcagagctttcagctctttcgcaaaccatgcaatcgcaacgacttcgatcaatccggcaagcgccactccgaaattgttgataaagtaatcggccgcatcgaggaagaacagtccgcctttcgtcgcaaatacgagcgaacacaatgcagcagcccctccgccgaacaggacggctttccgccgcggaacgttgaatttatcctgaatcgcggcaacatatgtttcagagatagaaatgagagatgtcagacctgccaaaacgagcgagccaaagaataaaaatccgaaaaacgcattaaacgccggaaactcattgatgatttgcgggaagacgacgaacgccaaaccgattcccgaagagacgacttctttgactggaacgccttgctgcgcagccataaagcccagcgcactgaataccccgattccggccagcagttcaaatgacgagttcccaaagccggtgataaacgcattgtttgtaatatcggattttttcggcaaatagctggaatacgtaatcatgatggcaaacgcaatcgacagactgaagaaaatttggccgtaggccgccacccacacttttccgtttgtaatctggctccaatcaggcgtgaaaaaggcattcagtccttgtgcagccccatcaagtgttatcgaataaatgacaatgataaaaaataagaccacaagcagcggaatgaaaatgcggttcgcgatttcgattccttttttgactccggcaaataaaatccccaatgaaacaatccatacaatcgcgagcggaatcaggacgcccggcacgaagccgccgaattggccgatggctcctcccccgatatcaattctgtttaaatatttattcattaggaaattttctgtatttttaccccaacctaaattgaatgaaaagacagtgtaagaaatggcccatgccacgataacggcataatacgtcgagatgacaaatgagatggcgacctgccaccagccgatccattccttccctttccccatcctggcataggacagcggggctgagcctctgtatttatgaccgattgtaaattccatgatgagaagaggaattcctgctgtcaagagcgcgaacaaatatggcagaaagaacgcgcctcccccgttttcataagctactgccgggaatctccaaatattccccaaaccgatcgcagaaccgacggctgctaaaataaaacccgctcttgttccccattgcggacgattatccataagcttcctcctttacctttttgaaacatctgaaaacagtgaattttctaacaattattattgaatagtatatacagtctttttgcctaagtcaaagtatttttttaagaaaatagacgcatgtcatttctaggccgcgcgaaaaaaagcattctgcctgatgtttgcagaatgcctggaaatcattactctttttgttcctttttttgctctgttttttcatcctttgaagggatctgaatcgatggcgccgtttggctgccgttgccgctgtagaagtcgggtacttctccgtgcacagcttgaatcgttgccggaatcgtatttttgacaaccgccgtttttgtcgcaaacggtatgacgacacggaccttgacttcgacaagcacaccgacatttattaatgcattattaataccatatggctcgacactttgcttaaaatctgtaaagacatcccccacaacattaagccgtacaggtattttcggccccaggtttccaagaagcgagtttcccgttgcctgacccagaggaatattatagattacaccatcattcttaccttcgggagttttcgcagaagaattaaattcttctgtttctgtttccttcagcttttcgtgaagttgtttcgtaattttcgaatgcataccacgaagaccatgagagttgaaatcaattgttgttacttttccattttcattcgtcttcatttctactagatttttcacattttcatcttggctcatataatcctcgacggcttcctggatgacgtgggtcgcaatccggttcgtttccatttcagcgatgttcagaagcgtcggtttgatggatgagttgataatcaacaggctgacggccgttgaaaaaataaaaaatacaaacgaaagcagcatgacatatcgcaaaggcaaaggtcctctttttgacagagggccgcgaagtcttcgcaagcaaaatccccccttacatcacaagtgtatgcttgtaagaggggatatacgattcaatcagacaactttatttcaccatttttaaaagggcttcttttccgctcattccgggatgaatgccgagctctccggccgcatcggttacagattcgagcggggcttcgagaagctgatcgatcgtccgcacgccgacggctctggcggcgacgattttccgttcttttaatttatcattcagcagggcgacatcaagcgctccgcacataatatatccatggtcattggttaccgccataaagttcgttttcggcagtttgaccgttacagccgtaaacggctgatcttctatcatgatcggagttaaatttaccatcgctatccctcctttaccattaatgtatgataaagcgagagacatgttccggtttgccccgaatcttagagatctgtttaggaccggtttgcttttttcagcttccaggcgagcagatcgcgcaggaattcaggcataaagtagtcaatatcttccgcatcgcggataacaggaaacagcgttccgagtgtaaacatatcaatcgtggcgagcgtgtagaacgcatcatcttcaatgtccgctccgttgacggagagcttttccgggtcaaggccggcatacagcatcttccccatcacttcgccgcgaaaaccgagccctttaatgcgcagcttctcggtttgttctgatgatgcatggaggatgacctctttcagctctcgtcccgtcagcttcagtttgaccggattaatcggatgcggacagatgcggtgaacatcggctttcgtcaccggaccttgtgaaagagactccagcacaatgcctgagttgaccatcccgatttccgcctcacaccattcctttaaggcatctgccagcatttgcggaagggcgcttctgcggaaccaggcggtttcaagggtgttgtccaatgtcgcaatttcctcttcaaggagatgtccggcttctctctcttttttcttcagaaaacgaatcgtctcctctgattcttcattccaatctgccgtcttcatcacggttgctgtgatgttctcaagcgctccgttatatgtcagttcaacatgaccgacatagttcccgtacttttccgcgcaggccagcataacgccgtctttcatcatcccttcttcaagcaggtgatgggtgtgggagccgaggatcaggtcgatttcgggaaaagcctccgcgacgcgctgatcgtccaaaatgccaaggtgtgaaagaaggatgacagtatcggctttttctttgatttcacttagcatctctccgatgctttcaaatgcgtctgtaaccgtccagccaagctggcgatagatcggatagtacgggactgtcacaccgagaatggcaagagttgcgccgctcttcacctttttgagcaaatacggcgctgcccagccgggcctcttcccttctccgtcaaacaaattggagacaacgacaggaaactgagcgttgtcataaagtgtatccaactcctgatgcggcagtgtaattccttcattgttcccgatcgttgcagcatcatactgcagacggttcaacagctccacattcgcttttccgaaggtagcctcagatatcggatggaatctgtcgacatgatcgccgaggtcgaacaaaagcacttcttccccctgctcttcatgtttctgtctttgtgtctgaatgtaatcgacgattttcggccagttttcaaaatggctgtgcaaatcgttcgtatggtagatatggagcttttccgtcatgcaaatctctccctaacgtttaactaaacacgccttgatagattaatctgattccgatgagaatcaatacgaaccgcatgatcaatacgatcgtctttgtctgcatctttttgttaatgtaggcgccgagctgtccgccaaaccaggcgcccgggatcaatgcaagcgcataaagccagttgacatgtcccgagatgacatggccggcagagcccgcgacagatgaaaggaaaatgataaacatcgatgtcgcaacggcgacccttgtcggaaataaaaacagaagaatcatcgccggcaccatcagcgagccgcctccgatgccgaaaagcccgccgagaaagcccacaaaaaaggcgatcgcgattccggctaaaggatggtatgaatacgtatattcctgtccttcatcacctgtgaacgttctgataacgcccgtatgctttttctcggcaggtttcacccttttctttatcattaaggaaagggaaatgaggatcataaaaatcccgaaccatagagaaaacgagtctgagctaaaatatgtcgatacatgggcaccgacgatgctgcccggccccgagccgatgaaaaaaataaggccgcttttatagtcaacggttttatacttcatatacgcaatcgttgaagaaagccctgtgaatatgatgacgaccagcgatgtgccgaccgccatctgcggtgtcacatggtcaaacagcgtcggcagccccgccagaaaaaggagcgagggaacgatgacgatccctccgccgagcccgacaagactgccgatggttcccgcgataaacccgagtatgatcaagataagatattccataaaataagtcctcttttctagctgaataaatcgagctgccttggcgtaagccctttgtattcaatgttgagcagctccatcatttgcttcccgttttgagccgcatcaccgcccgaattgttattaaacagcacgtaaacgtttttcgactgctgttcaagcagctcaaggtttcttttccagtcttttaattcttgttcattatataaatacaaatatctgacctcacgccaattttgaccggaagatggccttaaccagccttccttgttgcggccgtgaaaacggacgagcgttttccggctgtcagtcgcgtgaagaacagtcgggatgctgccttcgcccgcctggggttcatcgcaaatgctgtgaatccattgctgctcctccataaaagcgagtgttttgtcgtaaaactggggcataaaccatgaccgatgcctgaattcaagcgcacacgggatatctcccattttctcttttacccatcttaagtaattgacgttttctttcttgcaatcaaaccatggcggaaactgaaagaggaccatcgccagcttacccgcttttatgtatggcgttaatgagagcttaaaagcagcaaacatgtcgtctttcgtttcaaaggggatttccccgcgctgatgccctgtcattccctgatatgccttaacgataaactgaaaggtttccggcgtctcctttacccacttttcattgttccgctcgggctgtatcgcgtaaaagctcgcatcaagctcgacgatcggaaaatgcgatgaatagtggatcagcttgttttgactgcttgtcttgggcggatacaggctgtcatgatccccccatcctgttaatccaatataaatcaatgcagttcacctcttcttttagtttatcacaggtttttttcgaaaatcttgatccaggtctgcttgtagcatttcctttttcagcggcgggatacttgaacatgaaaaagaagccggacatccggcttcttttaacgggctttcctcggaaaaagggtaaagctgaaactgtacaaaaaatcgatgacaaggatgatcgaccataaagaagcgatgcggattaatggttccgttctttccgggtcgccgatgaacaggtgcatcccggccagcagagccgctccgatcagccatgcgatgaaatggcgaaaccagccttcacgctcttttttggcgtgttccctgccgtactgcgggcctttgtcaggcttcggacctccggcaaagcgataggcaaacctttcatccgcccatttgatcatgcggctcccgaacgcgatgctgacgccgatataaacggcggcgatgccgtgcaaaacatccgcttgcgccccattgtgcagatcaagcgacgttgcagccaaaagcagtaaatccaaaaccggtgtgcatgcaaacatgatcaaaccagcctttttccagcctgccatatagcgaaaaataagtccaagcagaataaaaatccaaaagccgatttcacaagctaaaatcaataaaccaatcaccttttatccgcctctctttttttaacacattcgtactaaaaaaatataacacagatgtattaaataatacacccgtgttataatgtggtgtatgccaaaaatagttgatcacgaaaaacaaaaagaaaaaattgccgaagcggtgtggaatgtgattcacagagatggacttgaacaatgcaccgtcagaaatgtcgctaaggaagccggactttcggccgggtcgatgcgccattattttccccatcagtctgagcttttcatttattcaatgaggcttgtggcaaaccgggtcaaaacgcgtatcgaaaacatgacatttaacggtacaccggctgaaaacgtcaaacagcttctttttcagcttatgcctcttgatgaagagcgaaaactggaaatggaggcatggtatgcatttacagccaaatcgctcagcgatccggagctcaaaccgttgagaaaggagatgaatgaaggcatttattcagcctgcaaatcggctgttgaaatactggtaaaaaccgaaaaaaagaccgggatcgatgttcttaaggaaaccgagcatctatacgcccttgtcgacgggctggcgcttcatttgatcatggcccctgaaaggctgacggctgaaaggatcgatactgtattggcgggttatttaagatcgttggaataggaacagatctatcgcattgcaccagaaggaactcacacaaccacagaaaagcaggcctctcagcctgcttttctggatttaatgctcttgttttaaattctcacggatttccttcttcatttcttcgacatttcttttaataatttcaatttcgtatttctcttttgcatctggaggtaagttctcatctaagtattctcggagtttttcttcgctgcgagtatcatctgggccgattgatataactggtctgtttttccaatcacagaactaactaaaccaaacttatcaaaggcgttcagaagtacttcttcagttgttttttgatttggatcagccgcttgtgaagctgtattaaacagtaacaagaaaagaactaagaacaagattccgaaccgttttttcttcattattctctccttaaaataatttttcctaagcacagcattgagtttctatttttatgtatttcagctttccgggacaccgtttattcatattttaggagccggtcctgaaagcgttaacgagagaggtgatctttattttctggggaagtaggctcatgaggtggatcagtgtaagtttatcttctctgaatggagatatttgactgttttgcaacttcttcttttgctagcgattggaggcgttgtcattatttccgcctcttctaccttgatacctcctttatttattcacaagtctaatatagcataaacctctgcaaaatttttcaaattacaaattgatttcacaaattattttgctggtcatcacaaaaaaaacagcctgatcgcaggctgtttttctgcactagtgaaccgctttttgtatctctttcgttcagccatgttccacctgttgccccgcgcgtgccggagccgtcaaacacgagccttcctctatctcagaagcctactcatgatagaaatccagtgccgcctgaagcgcatttcccggcgatactgaagcacctgtgcgaatgagaacagcttcgagagcagccaatgtaaaaagaacattttctttccggcagctgtatcccatcgttccgattctccatatctttccggccagcggcccgaaagagctggcgatttcgacgccgaagtcgtcaagcatcatcttcctgacaagatctgcgtcaacccgatcaggaactttcacacaagtgacggtcggcagctttttccggccttccgtaaacaattcgagtcccatcgctttgatgcccttgattagtgctgtttcatggagccggtgtcttgagaatcgctcgcggagcccttcctcaagaacgacccgcgctccttcgcgcaagccgtacagcatcgaagtcgcttctgtatgatgattaaggcgcctcgggctccaataatccatcagcatgccgaggtcaaaataattgctggaaatcggcaagcgtcccgtttcaagcacgatatcttctcttgtggcaatgccccgttctacctttttcctttcattgatgcgcttttcaacccggctgttaaatgtgatcggcgccatacctgaaggaacggataaacacttttgcgtaccgccgacgaccgcgtcaagacaccattcatccgtattgacatccgtgccgccgattgtagccaccgcatcgactacacaaagcacatcaagctcccggcaggcccggccgatttcttcgagcggctgaatgcatcccgtcgatgtctcgccgtgcacaaccgcaacaatctccggtttcgtccgtttgatttcggagatgacctctttcggttcaaaaacgtctccccacgggcattccattgtataaacatcagcctggtaccgttcgcaaatctcggcaagcagatagccgaaccgtccgaaaatgggaatgagcaccctgtcccccggtttgatgagactggcaaggacggcttcaagcccggcccgcgatgtcccgtctatcgggaatgcccatttatttgtcgttcggaaaatctgccgaagcagcgccatgacgtcgttcatcatgtctgtaaatgcaggatcgaactgtcccagtacaggtgaggaaagcgccctcagcactctcggatgaacctcgacaggaccgggagtcataattgtccgtttcggaatattcatttcgccaattgtcatgatctttttctcctttcattcatatgccagcctgtataatacatgagtcaagagctcaacgccggctgcaagatcagccggttttgtccattcttccggcgaatggctgatgcccttccggctcggaacgaacagcagtgacgtcgggcaatgcgggccgaaaacctgggcatcgtgccccgccccgctgaccatctcctgataggatacgtcaagatcctcggccgactgttttgagagttgaatcaaatcccggtccatcctcacaggcttcgcatccgtcgtctgttcaactgtgatctgaacgttccattcgccggccagctctgtgaaataagcaaaaatatcgtcgcaataccggtccaacaccgcatcatgatgatggcggagatcaagagaaaaaacagcttctcctgatatgacattcggcacattcggctttgcttcaatcctcccgaccgttgctgttaaaagcggataagcagctttagccttgttcgtcaaataggaaatgcacaatgccgagacggccaccgcatcttttctggcgttcatcggcgtcgtcccggcatggttgctttctcccttgaccataaccgtaaaccgtctttgtccgacgatgtccgtgacaatgccgatttgacggccgctctcctcaagaatgctcccctgttcaatatgaagctcgataaagcacttcacatcacgcctgaacgggcgcctgtaccgccgttttccgaaaccgcaatctttcatcgcctgctcaatcgatactccgtcccgatcgtgcacagccggcgtcttttgacagtcaaacaagcccgttaaattccccgatccccaaaaagtcaaagggaaacggcttccctcttcctcgcacagagacacgacttcgattgacgttttcggcctgccgtacgtgtccagaaggtgtttggcagacaaaaggctcgctaaaatcccgtacgctccgtcgaatttccctccgttgatgaccgtatcaatgtgtgaaccggtcaagatcgctttcgtacggttctctgtaccttctattctcccaaacagatttccggcatcatcgaagtacggctctattccccagtcctccatcttttccttcaacgactgctgggcgctgagccacggctttgaatagagaagccttgtcacccctccttctccgctttcaccgaatgatgccagccaattgatcatgtcttcgatattgcgggctgtactttctccggtcttatgaataccaatggtcatgtaaagaaacttcctttctattttcttgttatatttctttacaactctctatataaatacaattttactggtaacatgaaaaataaacatcggcataaatgtcacaaatccgctcattttttgttgaaaatgactaaaatgacaaaggaggcctgtacagatcaatgaatatctatgacatgatgaaactccctgtatttaaaggcgcaacgcttgccgctggaaaggcgggcgtaacccggaacattgaacacatcaatatgatggatgcgccagatattgccgattatctgcatcatggcgaactcctcgtcacgaccgcataccatttaaaagaccggccttttttattgaaggaattgattgaaaggatgatcaggcggggctgcgccggactcggtatcaaaacccgctttttgcaggaaatacccgacgaggtgatcaagcttgccgacgagcggacatttccgatcatcgagctaaatgaagatgtccgcctcggtgatattgtcaatcatacactgagccatattctagacaaacggacggcagaactcgaacaggccatcgccgctcaaaaaaagttcacaagccatattatgagcggaaaaagcattcaatcgctcttgcataacgtctctgctgttttaaagcttcccgttcttctattcaatcagcacctcaagccgattgcctcctcaaaagcagatgccgccgggacgctgtcggattatgaaggaatatttcaaaaaggaaacagaacggggctcacctgtttttcaacgattcccgacaaacaaacctattcggtatttccgatctatactcatgaaaaaaaatgcggcttcctcgttgtctgcgggatgatttccccttcagacaaaggcttgctgttaaccctcgaacaagccgccaatgtcatcgcctttgagctgctgaaggaaaatgcgctcaaacaatatttgcgaagagcgcggaacgagtttttcagaaattttttggacggcgccttttcctctgctgaagaaattaaaaaccgagcaaaagaatttcagctcaagtgggatcaaaaatatgtgtgcatcgccggcaaattggaccgccgcgaaaaatcgctcagcttcgcggaaaatcagcttgaatcagattccgtgttcgaacgcctggaagaagagctggttgacttcccgtttcctccgcaccttttcacaaaaggaaacatatgcttcctgctggccgaggcgacggacagctgggctgaaatgaatgcagccgtgggcggatttttaaaggcgtttcagcgccatgcatctgagcattttcagcggacgatttcttttggaatcagcaacctcagccatcagctgagagacgttccgcacatttgcaaagaagccgtcgatgcgctccactccggccatttgtcaggcagcaccgagttcatccagacgtaccatatgaaagacgtgtcagagcttttgcgcatgattccggctgatgatttgaagacattttacacgcatgcgctgcatcagcttgccagcctgccgaaggatgacccagggctcctgcaaacattgtccgtctatctggaaacgcactgtcagatttctgaaacggccaagcgcctgtacatccacagaaacaccgtcatctacaggcttgaaaaatgcgaggaactgctcgggaaaagcctgaaagatgcggacacgaccttgcgcttgagactcgcgctcagaattcaaatgctgcttgggttgtgagaaatcccttccccgcggcaatcggaggatgtaaagccgcgccggcatatttgatgatttgagcatttcaccataaaaaagccggcatatgtgccggctcccttatactttttcaggaattgtgcgcgcctgctgcttccgcccccagctgactgccgccaaaaagctgagcacgagaacgaccacaccaaaaatatatggaatttctacgttcacatcgaataacagaccggccactgtcggtccgacaatgttggcaaggctcataaacgcattgttcatgcctgcggcaaatccctgttcatctccggccatttttgaaatcagcgtattaatcgccggtcgaagaatggacgtcagcatgaagaaaacaattgttgccccgaaaaccagccagtacgaaccggcaatcgagcagacggcaagcgctccggcagaaccgatcagcgtcatgttcatcagctttttttcgccgaagcggttcgtcagcatcccgagagccaccgcctggacgaacacgccgatcagacttgccgctgttatgacaaaggcaatgtctcccggtgtaaagccgtgcttatgatcgacataaaggctgaataccgcctcgaaattcatgatcccgaagttcaagatgaacacgaggataaacagaaatgcatacggcgaccgcagcgcgcgcgccatttgcttagcgagcggttcgcgcttttgaacggagcggcgcttttcaagcatcttttcttgactgagcgtttccgggaggacaagaagcgataaaaccgtcgccaagccggctaatccggctgacacgtaaaacgggaaggtgagcccgaacgccgccaaatatccgcctgctcccggaccgatgacaaagccgagagacatcgcggcgctgatcagccccatccctttgcttcgatccttttccgatgtgatgtcagcgatgtaggcaaacatggccggcaccaaaaacgcagctcccgctccgccgagaaggcgggaaacaaacagcagccacatctggctcgccaaggcgaaaagcagctgggaaaccgcaaacgcaccgattcctaaaatgatcattttccgccttccgtatttatcagtcatttccccggcaacgggcgaaaacagcagctgggtaatccccgaagccgcgatcagcaatccgagcgtgctgcctgacgcgccgaattcttctataaacgtaggcatgagtggaataatcaagcctataccaagcatcacgataaacacgttaagcatgagcatatacaatctggccatctttttcatctgcggataccttccttcagcccgaaaataccggacaatcttaaattcgaacaattactaaattagtatatccacagataggtttaaagtctagttttttcatatttttgcatattttttcttctcaaggaatgatgggtaaataaaaaagcggagattcccccgcctttttatccatttacgaccagccgacagcgttagcaaacatcaggaaaagcacggccgctcccatccagaggcaaaacagcggaaggatgaatcgcagccatttgttccaggcaatccggctgatcgcaagcgtcgccataaaatatcccgatgtcggaaagacgatgtttgaaaaaccgtctccgaattggaaggccagaatcgccgtctgccgcgtaattccgacgatatcagccaaaggcgccataatcggcatcattattaaagcctgtccgcttccgcttggaacaaaaaagttaaacagcatctgtgtaaagagcatcgccgtaaccgttaaatacgaaggaagctgtgagacagcatgagacaagccgtaaacaatcgtatccatgatctgcccgtcggccataacgactgctgcagctcttgcaatgccgcaaatcatcgcaccgacgagcacttctttaaaaccctcattaaaggactcggcaatgtctctcgaattcatgccggcgatgtaagcaggaatgatgccgagcgccaggaaatagcccgccattgtcagcatatcccacctgaaataaattacacacccaatcaagccggcaaacaacccaagcgccgcgatcccggcccatttcacccgtccgcctgctttaaaagccggcacgggttcgactgcttccttgcccgtcaggcttttttcaggatgcgctctgatcttttccgcatatttgagcacataaacagcggcaatcgccgtaacgacaacaaagatgaccgccctgtaccccatcccggaataaagcgggagaccggaaatcatttgtgaggttcccacggtaaatgggtttgtcaaagcgctcgtaaagccggcgatcgtcccgcacaatgcgattgctgctgctgtcatccggtcatatccgagggacagcagcaaaggaagaatgacagggacataaacgatcgaaagctcaggcgtcccgataaaacaggaaatgccggagaaaacgaatattaagacaggcgtaacgaaaacaggcttgttcctgaactgatcggccaacagacggacgccgagctcaatgacagatgctttcctcagaacggcaaaagctccgccaatcacaaacgtaaacacaataatcggagccgcttctgtcatccctttcggaaccgccgtaagcaagccaagaatatcaaccggcgtctgttcgacccgtttgtaggacgctggatcaatcatttccctgccgtccggactttccacccgttcatattcgcctgccggaatgacatatgtcgcaagcgccataagaccaatcatgacagccagaatgacataaatatgcggaaattcctttttgcgtttttcgttctttttcacctcttctgttttgtaagccggcattcccattttttaatctccccttcttccatgttaaattttttaacatattaaatgatcgcagcgctgatagcattgaaaaatcctctaaatttcagcgtgttttcagttaaaatacataaatcaacacgagcaatccagaaaatcgtcacattttctatcaatcattaagctgatcatctcgactgttccttttctgcattttcatgtaaagtcataagaaagatcagcatgtaaaggagagagttgacattgcagcagtggattaaagaagtggccagaggaaaaaggggcgcccgggatttaacttatgaagaggccagacaggctgctgaagcgattgttacgggaaatgcaagccccgctcagacagccgcgttgttaatagcggagaggatcaaaacggagtcccctgaagaattgttcgcgtttaccgaagcattgcggaacagctcggaatcattgagcctttccagagctgtaaaagaggcggtcatcgattttgcaggaccttatacaggaagacattcttttttagcaaccattcccgtctccctccttctcgcaggaaacggcgttcctgcgtttctccacggcagcgatgcattgccgcccaaatatggaacgagcgtaaaagatgtcctggacaaactcggaatcccctctgagactgccccagcgcaaacggcacgctcactcgaaaaggctttaatcggattcgccgccgccgaaacattttgcaaaccgtttgttcgcatgaggaaaatccgcgaggaaatcggcgtccgcaccgtgttgaatacagcagaaaaactggtcaacttctctgatgccgacaagcttatgatgggcgcatttcaccggacggccatacagaaaatgcatcccgtatttcagcgcttgacgtacaaagaagtgttcattgtccaggggcggagggctcggaagatgtgccggtccacagaggcagctttgtgtttacaataaaaaacggcgagatcgattcttttatattaaaacctgaagaatacggactttacgcagaggaagcaaagctcaacaaaccgctgtctgctgaagagcaggcggaaaaaataacagccgttctcgccggagatgaatcggcggatacggaatacgaaagaaaacaagtcatcatgaatgccgcattgcgctattatttgttcggatactgcgcggccattgaagaaggtgtccaagcggcggaaaaacagctgaaagaaaaagccggtctggaagctcttgaaaggtggaaagcttcatttacaagaccgtaagaaaaccgtaatcaaaatgatatttccttttcatgaaaagattggataatgaaagaaatgaaaaggaggggatcgatagatgaaccgaaagtgtgtcattccgtttattttgatgttgtcggcgatgtgcgcgcccgcccaaaacgcagaggccttccagctgttttccttacccgtacaatcctcggctccggcagattactacgaacaggcgcagggcaaaacaggtgaagctttaaaacgagcgcttcacgacacaatcgacgatcatcgagagctgtcttacagcgaggtatgggaagcgctgaaagcaacggatgaagatccggccaatcgaaacaacgtgatactgttatattccagagagtcgcgctctaaacaggcgaacggggggcaaacgggcgattggaaccgcgagcacgtatgggcaaaatcgcacggtgatttcgggacaagcaaaggacccgggacagatttgcatcacctcaggcccagcgatgtgcaagttaacgccgcccgcggaaaccttgattttgacgaaggcggcagcccctatcccggagctcccggaaactactatgacggcgattcctgggaacctgacaaaagcatcaaaggcgatgtcgccagaatgattttctatatggcggtccgctatgaaggggacgacggtcatccggatcttgaaatgaacaatacaacgaacaacgggtctaaaccgtaccacggaaaaatgtcggttttattgaaatggcatcatgaagaccctgtcgatgccctcgaaagaaagcggaacgatatcatctatcagcaataccagcataaccgcaatccgttcattgatcaccctgaatgggcggaggatatttggggctcgggcgttttgaattgaacaaaaaaagcgcctgctcagcgctcttttttcaaacctctgtttttttgttcagcaccgattttttatccataaaacgaaagaaatctgctgtgcagcagccgcgaggcacggcttcatgggccgattatctacactgacagcccagatcccgcagtctccgttcaaacagccgagctcaatccgagccttcctccacgcacatctaaaagcgtgtcggccggcttgatggaagccggccttttttctccgttcatctcaagggttacttccatccttttagcgctttgtcataaggtttcctttttcagcatgccgagaatgtcaaacagagtatgtttgatgacaaacgtgcggtactctgcggaaccttgcgcatcgtccaatacaggaccgggcaggcggttgatcgcctcttccaccctttgaccaacagggagtgcctcgtcattcaacgcagattccacttcagcggagcgaaacggataagagcagacaccgctgaatgcacagcggacgcgtccgtctatttcgagagccgaaatcgttgccaaaggatatcccgtatcccatcgctgcctcacttttatgcttgcaaaaggctgatgaagatagcgttcttcaatcaaaagcgaaatgaggatttctcccttgctcagcttcagctgctgatcaaatacgtcgtgaatcagatagcgctttttccccttgtctccaactgtcaccactttgctgtcggttaataaaaaaggcagcaccgcttcgcggtaaaagatctgcccgcaaatattgccgccaagcgtaatcttattgcgcgccgtatggtcggccacctctctcgccgctttgctcaacagcggaaagccgccgttttccgtgatctccgtcagtgttagcgccgagcctaaagcaaggtgatgccgttcaaattgcaaagtcctgcactcaggtatatctttaatatcgatgacggcatttgtatggatcacattcatccgtccgagcatcaactgttctgttccgccggaacaatacgccggctttttcccctcccgctccaggctttgaaagagctttaccgcttcctgcgcagattgggggctgtaatactcaaagtcaaactggatcatggcggtcctccttcattttccaaatttgtttggaatcagaggcagccgattcaaaaaaccggcatgcacttcaaataaagccagctcattcacccaaaattttactccatgaatttatattgaacaatattctattttaaaactgtaaacaagaaaaaagttcactcgaagctagagtgaacttttttctgcacgttgattcaactttcaagcgcgccggccggatcatataaagcgatatcaagctcaggctcttctcccaaagcgagccttgccaattcagcgccaaggtacggacctgacgtaagccctgaagcgccgagaccgttggcaacgaggagcccgcaaatgttcggcaatgagccgatcacggggagaaagcccggtgtaaacggcctgaagcctacgcgcgcctcaagcagctcgctcaattccaaccccggcgcaacggcgagcgcctttgagaaaatttcgtgaaggccgccggccgttacccgaagatcgtccagttccgcttcattttcgtgagtagcgccggcaacgatccggccgtcttcaaatgccagtatgtattggtcattcggaggcatcacaacaggccagctgccggtatcggcatcaggaagacaaaggtggacgatctgcgctttttggtagctgactgaaaaacgaacgccgagcggcttcaagagctcgtccgcccaagctcccgctgtgacaagcacctgatcagcgtatattttcttgccccctgtggagatccctgttacccggtttccttcatagagcaatgaagcgtttcctgaaacaacagaagctccgtatttttttgcggcattcacaagtgagcggcgcagcaattttccattcacgcgcgcggctccgctgatatgaaccgagctgtacccctctgccaaaggcggaaataaacgcttcgtttcctcatgggataaccgggtgatctcgccgatttcgggcgcatccttgcgccttagatgcgcccgttcttccattttctccagctttcgctcgtctgtatgcaagctgatagcgcctgtccgtttataccccgtatccgattctccgtcagcttcaagctgcttgattaaatcggcatagtacgccgcaccgccttttgcaagcttgtaccatgcctggttcctgcgctgcgaaagccaggggcagacgattccagccgcggcatctgtagcccttccccgctctccgcggtcaatcaatgtcacatccgcgcccttttttgcaatatgataagcggctgaagcgccgaggatgcccgctccgactacaataaaagatttcatgactaacacctttttcatttctgtttattctacaaatataacggatcacaccgatggagcacaacctaaccagcggctaccgatatcacgccaagcaccattaaggcagccgcgatgatcctcagtcgtccgaaaccttcggacaaaagaaccgcccccatcacggttccgattaaaatgctgatttcccgaacaggcgccacatagctgaccggggcaaataccatgacactcagcgccaaaatataagccaaagaattaaaaaccccgaccccgacagcttccatccggtgatgcttccactcaaaccggacttcactccagcttttcgcggcataaggagtcaatatgaccaggcggccgagcgtattgcaataatccagcagcaatggcggaatgagaaaccggctgaccgctgctttatcaaggagagtatatgcggcaataatgccgccgaccgccagcccgtaaagaaccggtgtgaacgagcctgattcttttaaccgcttcactccccctgtaaaaaaaagaatgctgatcacaatcaatagaatccctataatagcgggcagcgtcaacgtctcgccaaaaaaggcgaccgccagcatgcaggtgagcagcgggcctgtccccctcgcgatcggatagacaagggagagatcgccctttttgtatcctttttgaagaacaagaaaaaagcccaagtgagcaaggatgctcgccatgatgatgacaagctgccagatgccgatctcaggcttttcatatatgacgacacctatggccaacggcgtgtagatgacggctgcaatcgctgtgaacagccagataaacggaacgcctccatcggcttttttagaaagatagttccacgatgcatggataaatgcagaacataataatacgcaaaaacccacgacagtcattacacagccctccgtccatcataaaagagatcaatgcttgatgacaatgtagcgcttcaattccccgtgccacttctttcctttgacggcatccacccagacgtcatacttgcccggtttcagctttttcgtcggaaagctcacccgaaaatgaggctttccgcgcgttaaatgaacatctcgatagatcaggacagtcccttttttattgatcagcctgacggcaatcatcgttcccgtaacagggctttttccagtgacaacgatcgaagtggctgatttcgtatatgtattggcatccgtcctgaatttcaccgcgcctttggaaggcatagcaaaggcttctgtactcccggcaaatgcggccagcaagaaaacagcggctatcaacacagcctttttcaacattttcactggtcatatcctttcttatacagtatgaatgtcacatgctatacccttcattatacatgacaatatgatctaataaagatatttgacaagaagatcctgttcttctttaatggacaaatactgtataaaggaggtgatttaatgtattaagcaaagatgaaaaaatgaaacccgcatatagaagaagttactgttgaaatacaaggctatgaatttaccggcttttcaactgtctgtcccacttttatagaagagggtaaagagtatcccgtcatgatcaaaatttaccattttctaatcatgaagcattccccaatcgtaaaacctatgataaagaccgcgcaagctgaggagtaattcggattttccattgacacctcgcaaattgcgaatccggtccccacttccaaaagaataaacagataagatacgattctggattttaaatagcttgccatagaccgacctttctttctgcgattacttaaaataataatcaagtaatcaaaatttgaggttttaataatgctgggggaaattcttttttatagtaagaaatcctgctgctttaactacccctagaacgatttagtttacatgtagaaaagcactcctttgaatttgtcttctcgcattaactgttatccggtagaattccactgcatctcgaattttttcttttttctctaatagttcagccgctataagaccgtattcctccatgtctgcatacttgcctttactttcgaaaaacttgaacgattcgcgaaccatatccagatcaaatgaaagataaagcccttttattaaatcaaactttgcaagcatatctaaattcttgttcttttcagccaactctttgccttcatagtataggtcatcagttattgacaacttcccttgctttgccctgacatgtgcgaggttgaataatgtttttggcaaaaaactatgcttctcctctttataaaggttcagagctctttgaaaattgtaggttgctttatcgacatcttccaatttattgtagcatattccgatatttaaatgtgatgaacccataagatgaagaattccttgtgtctctgactctttaagctctttatttaaattatgtagagctttttcgggatacatatgatctagccagttacctgcaataataaactgactttgtactcgacgctcaccgtaagtatcatactttttgaataagttatacgcacgacttgcataattcatcgaaaagatggtttgtttcatatggtaatacacttcagatgccttgaaataaaattcagccttttccagttcatcacaatcaaaagaatcgagttttttctcggcatccctataaaaattcagcgcaaggattaattctttttgtctgaaatgatacattccagcgaaaaaatgataataataatccaacattccttccagattattctgatcgcgaatctttttgaactcatcaaaacgactatttaaatttacaccgggtttagaatacatataatcaagttgaagattatgccggaagagcagtaagttgtaatagacaatcacatcctgattttgttccatttgttctaattctcgttcaacttctttcttagtatcctcagccttgcctgtccaattgttttttaaggctgtataccaaaaattcattttcgtcgcaaccaaatcatatggtatcacgctcacatatcctcttcctttctcgcaagattataatttttctaaaaacccaaaatagcaattcccttttgttcatagtcatcattttacataaaaggaataatttttcacaacaacattctcagaaatctttataagttagaggttttttggcctaatcaatatgattcgttttccgtgtttgggtgaattttagaagtataggaaggaaggcagaacagatgaaggattatattttcctgttgatatgtaatttggcataactaatcgttaggaagcaaaattcaaacctcttttatgaaataaaaagctaaagaaaaaaccgcagatacatttctacgccttttagaaaatcgataggcaatagattatatctgcggtacacaaacataaagtttattcgggtgcaatcaaatcgaaatctgatcaccccctttagtatcaagggttaaccaatagacccttccatctcgaacttgataagacggttcatttcgactgcgtattccatcggcagttctttcgtgaacggctcgatgaagcccatgacgatcatttctgttgcttcttcttcagaaataccgcggctcatcaagtagaagagctgctcttcagatacttttgatactttcgcttcgtgctccaatgaaatgttgtcgttcaaaatttcattgtatgggattgtatcagaagttgatttgttgtccatgataagcgtgtcgcactcgatgtttgagcgggcgccttcggctttgcgtccgaagtgtacgattccgcggtatgtgacttttccgccttgttttgagattgattttgaaacgattgtggatgacgtattcggtgcaaggtgaatcattttcgcaccggcatcctgatgctgtccttttcctgccagggcgatagaaagcgtcatgccgcgcgcgccttcgcctttcaggataacggcaggatatttcattgtcagcttggagccgatgtttccgtcgatccattccatcgtcgcgttttcttcacaaaccgcacgctttgtcacaaggttgaagacgttgttcgcccagttttgaatcgttgtataacggcagtagccgccttttttaacgatgatctcaacaaccgcgctgtgaagggagttcgtcgtataaacaggtgctgtacatccctctacatagtggacgtgagcgccttcgtctacgatgatcagcgtccgttcgaactgtcccatgttttctgagttgatgcggaagtatgcttgcagcggagtatccacttttacgccttttggcacgtagatgaatgatccgcctgaccataccgctgagttcaaggccgcaaacttgttgtcagtcggcgggatgacttttgcccaatgctcgcggaaaatgtcttcattttctttgagggcgctgtctgtgtctttgaagacgatcccttgagactcaaggtcttctttcatgttatggtaaacgacttctgactcatattgcgcggatacaccggccaaatatttttgctcagcttctgggattccgagcttgtcaaatgtctgtttgatttcctcaggcacttcgtcccatgatctttctgaacgctcagaaggctttacatagtatgtgatttcatcaaagtttaatgagtttaaatctccgccccattgcggcattggcatattgtagaagtgttcaagagatttcaagcgaaagtcgagcatccactgtggctcttctttcatgcgtgaaatttcttcaacgatttcttttgtcaatccccgctctgaacggaaaatggaaacgtctttgtcggcaaaaccgtatttatattcgccgatatccggcattttcttagccatccattttcactccaatctttattcgttatcgctgttttctttggaaacgcctttttcgagggctttccatgacaatgttgcgcatttaattcgggccggaaattttgaaacgccttgcagagcttcaatatctcctaaatcaatcgaatcgtcgtagtctttgccctgcatcatatctgaaaagatccgtgacatttgaagggcggtctccacgtctttccctttgatcgcctgtgtcatcatagacgcagaagccattgagattgagcatccttcgccttcaaattttgcatcttctactttaccgtccgttatcttcatcgtcagcctgatccggtcaccgcatgtcgggttgttcatgtcaacgacgatgctgtcattcaaaacccctttatttctcgggtttttatagtgatccataatcacctggcgatacagtgtatccaagttcacattaaaagacatttgtgaaatactcctttgtcttctgaagagcttcaatcagtttgtcgatgtcttcttccgtattatacagataaaagctcgctcttgcagtggcggagacgttcagccatttcattaaaggctgcgcgcagtgatggccggctctgacggcgaccccttctgcatccagcacggttgccacatcgtgcggatgaacgtcttcaaggttgaacgtcacgagtcctgcacgttcggccggaccatagacaacagcgccttcaagctctttaaagcgctccagcgcgtatgccgccaaacggtgttcatgcgctaatatttcatcaagtccgatgtcttcaaggaagtcaatcgccgctcccaatccgatcgcgccggcaatgatcggtgtgccggcttcgaatttccaaggcagctccttccaagtcgattcgtaaagaccgacaaaatcgatcatttctccgccgaattctgcaggttccatgttttcaagcaatgctttttttccatacaataccccgattccggtcggaccacacattttgtgggctgaaaacgtatagaaatcgcagtccaaatcctggacgtcaattttcatgtgcggcgtgctttgcgcaccgtctacgaccatgaccgcgccgtgttcgtgggcgattttggccatttccttaatcgggttgatcgtaccgagaacgtttgaaacatgcgctgcagagacgatttttgtattttccgtcaccgtttccctgacatcgtccaaggaaatggtgccgtcttcctgaagcggaatgtacttcagcgtggcgccggttgctttgacagcctgctgccacggaataatattcgcatggtgctccatcggtgtaatgacgatttcatcaccgggcttaaggtttgcgcgggcatagctgagcgcaaccgtgttcagggccgttgtcgtaccccttgtgaaaataatttcctgcatcgatttcgcgtttataaacttcctgaccttctcacgtgctccttcatatccatccgttgcttttgttcctaatgtatggacgccgcgatggacattggaattgtaagagttgtaatactcatcaagcgtctcaatgacgacgcgcggcttttgcgaggtggccgcgctgtccaaataaacgagatcgtgtccgttgacctgttggctgagaatcggaaactgttcgcgaatatctttagcattcattattttactttcctttcaatcacagagaccagctgcttcttcacgccttcaatcggaagttcattgacaaccggtgcgaggaagccgtaaatgacgaggcgctctgcttcttctttaggaattccgcggctcatcaaatagtagagctgaaccggatcgacgcggccgacagatgcagcgtgtcctgccgttacatcgtcttcatcgattaataggatcgggtttgcgtcgccgcgcgctttttcactcagcataagaacgcgtgactcctgctctgcatttgattttgacgcgccgtgctcgatctttccgataccgttgaagatcgaagacgcggaatctttcataacgccgtgttttaaaatatagccttctgaatgctttccgtggtgaatgatttgcgttgtaaagttttgagtctgttctcctctgccgacgacaaccgttttcgtatcgccgaatgtgccgtctccatgcagattcgtcgtgttttcagaaatggtgtctccgtcattcatcaaaccgagcgcccattcaattttgctgtcgcgtccgagtgcagttccgcggcggctgacataagccgttacccctgcggaaaggttgtcgacggctccgtattgcacgcgggcattcgcgcctgtgatcacttctgacacgatgttaaagaccgcttccttaggattcaccgtgctgatgtagttttctacatatgtgacggcactgttgtcatctgcaacgacaagtacatggttgaaaagcgttgtatcgttgctttcatggacataaacagcctgcaccggagcttccagctcgacgtttttcggtacgtaaaggaaggctccgccgttcaggagggctgcatgcaatgcagttaatttatgctcatcggcttttacgccgtctttcataaagtactttttgacaagctcgccgtgttcgcggaacgcagtatgaatatctgtaaagatgacgcctttatcctgcagctcttttgaaagagaaaggtaagccggcgtctggtctctctggacataaagcgttttgtcttcatttccaagatcgatcagcgatttgacctcatctgaaagatcatccaaagaatcaagcggtttattttctacagtatgcttatcaaaccgtgtaaaattccaatttgtaatttttgttttatcaggtttcggcagcggcagatcttctgctttttcaagcgcttctaagcgtagatcttgcagccatgccggttcctggtgcttctcagagaagcttttgacatattcccgatctacagatagttttgtttccaatgtcatgtttatccccctaacgcttacgcttcttgaccgacagtttcgtcttcgattccaagctcatgcttaatccagtcatatccttcagcctcaaggcgctgtgcaagttcaggtccgccggatttcacgacgcggccctgcatcatgacgtgcacatggtcaggcgtaatgtagttcaagaggcgctgatagtgcgtgatgatcaggcagccaaagttctcgccgcgcattttgttgattccttttgaaacgactttaagggcgtcgatatccaaacctgaatcgatttcgtcaagaatcgcgattttcggttcgatcatcatcagctgaaggatctcgttgcgctttttctcaccgcctgaaaaaccttcgttcaggtagcgctgcgccatatcagggtccatttcaagaaattccatgttttcgtccattttgcggatgaatttcattaaagaaatctcgtcgccttcttctctgcgcgcgttgatcgctgaacggagaaaatcggcatttgtaacaccgctgatttcactcggatactgcatagccaaaaacagaccggcttgagcgcgctcgtccacttccatttccagaacgtccttgccgtccagcgtgatgcttcctttcgtcacttcgtatttagggtgtcccatgatcgccgcggataaagttgatttacccgttccgttcggtcccattacagcgtggaattccccgccttttatttcaaggtttacaccttttaaaatctctttcccttcaatctcaacgtgaagatctttgattgttaatgtcgaagcagccatgaaatatacctccaattatagataatcatcattctcaatttattctcattctaattttataacaaatgaaaattgaatacaacaatagtcttcctatcttttcgtgtacatgttctcaagtttaacaaaaaacgatttgttcttaaagagattgggacaagaaaacttcccggggcagaaaagcggaatttattaccaagctgtcgaaaacaatcggtacatccgtcattaagagcggggatggtttgctcccaggctgcacgattcatgaggggaacagcgctccccttctatttgaaccgtcacatgctccacgttgcattctttccttagatattttgatacttgttttaaaattctatccctgtcactgttttcatccgctacgatatggcagcttaatgacggcatatcggatgagatcgaccaaatgtggaggtcgtgaacctccctgaccgacgggatggaaagcaggccgtttttaagcgcctccgcatcaatgtctttcggttttccttccattaatatatgcaccgagtctttcgtcacccgccagccgctgacgagaaccaaagcagcgacgacggcgctggcgattggatcggcgatgttccaattgaagaaaagcataaggaggcccgcgatgatcgccccgaaagagcccagcatatcgccgatgatgtgcaaaaaagcgctccgcatatttaaattcccgcttgtgtcgcctttcattattacccaggccgcagcaatgttgacgaacagaccaaccgtcgcaatcgcaagcataccccttcccgcgacttccggcgggctgaaaaagcgattgtatgcttcccaaaaaatataaagtgaaatcaaaagcagggtgatgccattgataaacgcagccaaaatctcaaagcgcctgtagccgaatgttttgctcgcgcttgcggccttttccccaattttaaacgccaagaggctgaagccaagcgccgcagcgtcgctgagcatatgtcccgcatctgacagcaaagcgaggctgttcgtcaatattccgcctatcacttcaatcatcataaaagtaaaaattaaaccgaagctgatgaacagcgctttttgatttgctgatcggctgccatggtggctgtgtcctgtatgtccgtgagaatgagccattttaaatcctcctcttaaattgatatatgatcatgtattcatatttaaattttaccttttcctttaattaaggtcaagcggcttctaagaacatggagaaggacggatcggcatccgtccccctcgcgttttatccgattatgggcaagtctgatacgatctgcttgcttttttgatactgcttttctcgtcttttctcaacttcaagccgattcacatggcttctgctgtactcctcgtaccccattccatgcgacttgtgcatcgctttttccatttcggccgtgaattcaaggtcaagctgatcttggcttgaacaaataatgaatcatcctttcagagattttcttacatagtaccagttatatacaaactctgcaaagatgtgtgtgctttcaatatgctttcacggtcgaaaaatcaatgcttcatctgctggaattcttccatcgcctgcaaaacgagcgtgacggcttggctcatggctgcgcctccgccaaatgcagcagttacaccgactgcctcaagaatttcttcctccgatgctccgcaatccaggcagcccttgatgtgataaataatgcaatattcatcctgcgtattgacactgatgcccagtgcgatcagctgcttatccttttcgctgagcacgccttttttaaagcactcttcggtaaattcgttgtatttggcggcaattccgggcattttttcggaaaagatgccgatccccgccttatattcgtgcagtgcggattcgataatgccttctgattcatgctgattcacgttttgttcctccattttcagtaggtagtcttttttattatgagcctcttttcaaaaaatacgcgaaaaaaccccggttttctccgaaaccggggtgttctttcatttactcagatacagaaatgacagagcctttatattttttgtcgatgaactttttgatgtcgtcagagcgcaatacttccatcagagcttttactttgtcagaatcttcgtcgcctttgcggacggcgatgatgttagcgtaaggattgtcttttggagactcaagttcgattgaatcagttttcggattcagcttgttttggatcgcatagttcacattgatgaacactgcgtctgcttcattagcttcgtatgcttttgccgtcatttcaggcgccacatcatttttgattttcaggtttttcttgttttctgtaatatcttttactgtcgcatctactttttcaatgcctgatttcagcttgatcagtcccgcattttcaagcattgcaagcatgcggccctgttcagcggcattgttgctcataataatttttgcaccgtcaggaaggtcttttaaagatttatactttttagagtaaatgccgaatggctcaaggtgtaccgcaccgacgttgactagatcgtaatctttgttttctttcatttcctgttcaaggtaagggacgtgctggaagtagttcgcatcaagatcttttgtagcgagcgctttgttgatcagtttgtagtccgtgaaatttttgattttaagctcatagcctttttctttcaaaagcggttttgcttcttcaaggatttcggcgtgaggcgtcggcgtcgctccgactgtaatgactttgctgtctttatctccttcgctgctggaagatccgcaagcggccaaaacgcctgcaaaaatgatgaataaagctgttaataaaccttttttcatgttggtgtcctccctaacgtttgtctaatttatttgttataaaatccccgataaattggatgatgaacacaatagctaagatgaaaatagtggcgatcagtataatatcgggattgttcatctgaaagccgtttacataggcaaggttcccgagtccgcctgaaccgattgctccggccatcgctgtcgaaccgatcagtgcaatggctgtaaccgtaatgcctgagatcagcgccggcatcgattcgggcaggagcactttaaatatgatcgtcgatgtttttgcccccatcgatttcgctgcttcaatcacgcctttgtcgacctcgcgcaaagcaatttcaaccaggcgggcatagaacggagcggatgcgataatcaaagccggaagagcggcattcggccccagaatcgtattcattaaaaactttgtgaaaccgagcagcaaaataatcaatatgataaaaggaatagacctgaacacattgacgattgccgagattacaccgttaacgactcggttctgccaaatgttgccttttgaagtcaaatagagcagcatgccgagaatcactccgatgataaaagcaaacaatagggaaattcctgtcatatatatcgtttcatacgttgcttcccacagctgctccatatctacgtttggaaacagtttttcaaacattcgtgatcacctctgcttctacctggcggctcttgatgaaatcgaccacgtcattgacctcgttttcacgtccgtcgacatgtatgaacaatgaaccgtatgcaccgtcctgagtctgcgagattttgccttgaaggatgttgacttcaacatcgaacttccgaatgatctgcgtgatcagcggcgattcggccgcttcgccgacgaaagtgagcttgatcgtccgcccggatgtcgtttcttcgaggaaatgcttcagcgtttcctttgtttccaccggttctgttacctgctgaacaaagcgctttgtcatttcttccttcggcttgatgaagacgttcagtacatcgccttcttctacgacctttccgttttccatgacggccactctgtggcagattttcctgatgacatgcatttcatgagtgatcaggacaatggtcagtccgagcctttcattgatatcggacagaagacccagaatcgaatcagtcgtctgcggatcaagcgctgatgtcgcttcatcgcataacagaactttcggattgtttgcgagcgcccgtgcgatgccgacgcgctgcttttggcctccgctcagctgtgaagggtaggcgttttccttgccttcaagaccgacaagcttaatcagttcagcgactctttccagacgttttgctttgctgacaccggcgatctccagcggaaacgcaatattgtcgcgcaccgttctcgaccataacaggttgaaatgctggaaaatcatgctgatttcctgccttgctttcctcagcttcttccctttgatctcgctgatttttctgccggctacttcaaccgtgcctgaagtcggctgttcaagtccgttcaagagacggatcaaggagctttttccggctccgctatatccaataattccgaagatttcaccttttttaatcgtaagggtgacatcttggacagcattgacatctccatgctttgaccgataaatctttgaaacattttgaagatttatcaaaagccatcacctgctttcttgctcaattctcatagttgtctaaattcctgatcaatcaacgaaaaaagcctttctgcacacatgagcagaaaggctttggaaaagtctgggcctttctctcatctttcaaagcataacgcttcgcgtgaattggcaccatttcaacacgtgttgatggttgccgggtttcatagggcacttccctccacctctctggataagagaaacatatatttattttttgattattatgatcggaattcttaaagtaggatatcatgcgaaaaaatagttgtcaactatttttcgtaagacaatcgtcctacggcgaaaagagacgagcgtaaacgcccgtccctgtctgactaatacacggaatgtgccgattttttgaatttttaaaaagtctatgaataaagatcgctgtttttaaagaagccgtccgtcagccataaaatcgcttcaagcttcaataaagctctaaaagagccttttactttaacagtgccgcgctgtacgagatgctgcaatgaaatgtcgccatgaagaaggtcaataatctcgctttgctctccaaaaaaggtcaaatgagctttttctacaggagaatatttttccatttcccctttttcgttgattgctaacgtaaaagcttctttctctccttgaaacgtaatcagcaaagccgttgtagataatagaggttttaaaaaaagagccttgccctctctttctatcaatcccattttctccaactgtataacctcctgtaaattggtcatacttacagattctctgtctgctgcaggagttcctttaggaattgctcgacaagtttttgctggttatttcccgagaaatttgtcaaaaccgcccttaatccacaagattttgtttaatcgtatcatataagtaggaaacggagtgaaaagcgtattcttttttgacgactcgcccttttttgtaaaggataaaacacgggacgctttcaatttcctgctgtttggcaaatgacggggagtaattgagattgtttttataaaaaggaatgtccttcatcatttcatcaacgacctccagcattcttccggccagctgacacgttccgcagaacggcgtgtatacatatagaagacaagtttcatgctctagccgttttagctctttttcttgaagttcttgcatctgttgaaccgcacctcaatacgttttataatagatattttgtatgtacccggatgtttgaacgaaataatacttctgcaacatgctgactcggggcggaagcgacttctttgtatactctatcaatgtatagatgcgaagcttggggaagctccctcttcagctgccggcggagcttttcgcctgattcatcggcatccaccaggatataaacgtctttatcgaacagcgtctcagcgaattcatcgagttttgcctggctgatcgttccgtttgtgcatatgatgtccacgggctcttcgatgacatgcttcactttttgcttatctgatttcccttcgacgatcatgactttttcattttccggcatatggatcacctttaaagatttacttgtaaaaaaaggcagtgaatattcaccgcctgacttgattaacaccagccttggtggtcatcacagtctacatatttagcatccggtccgcttacggtatccgccattttgtaaaacttttcatcttggaatgaatatccagatttcaactcgtattgatccttgccggtcattcggccgatcagctcattttcatgatacagctgcgttccgccgttttttaatcggctttccacatgttctgtaatatcaatacgttcttttttcagcgtcaatttggacaccccctcctgatatagagtatccaaacgacgaatgtctatcctgtttagtcttcttttatcatgtcctcatattgcccggctgtcatcaggttttcgatttcagaagcgtctgacggctcgacgacaatcatccaagccttttcatacggagactcgttgacgaattcagggctgtcttccagatcttcgttcacttcgaccacttttccgttgatcggggcatacagctcagaaacggtctttacggattcaacgctgccaaaaggctcgtccgctttgatttcgtctcccacttcaggaagctcgacaaatacgatgtctccaagctcagattgtgcaaagtctgtaatgccgattctgactttatctccttcggttttcacccattcgtgttcttctgaataacgcaactctttcggtgtgctcatgctaacccctccataaagtgttttaatcgatcctacattgaagatatcatattttgatgtgttataaccagtatgtcttaaactgatcttctttaaaaccgaccgttactttactgccgtctgtcgtaattgggcgtttgatcagcataccgtctgatgcaagcagttccagctgctcatcttcagacatgctttgcagcttgtctttcaggccgagttcgcggtatttttggccgctcgtgttgaaaaacttcttcaattcaagcccgcttttctcgtagagctctttcagtttttccttgctcggcggctgttctgcgatatgtatcccattgatttcttttccgtggtcttcgagccattttttcgctttgcggcatgtcccgcatttcggataccagtaaaaatccaaagccatacatacacccctctcatttaatcgaggtaattttaacatagatcgaatgaaaaacctaaaacagtgctcgggttctattaacagctcagaaagccctgcattaaagcagggcttctcgtttaaacgatatatttctcagcttcaaagactcccttggctgcctggcgctttttctcaatcacgttgacaggcgtaaagcgcgtcaatttgcgcagcgcggacagcatcatgcgcagcgaatcgcctgattccatcgcaatgagcgattctttggcatggctttcaatttcctgaaaggcttcctgcgcaaaaatttgcgtataaagaattttctgtgcgtttttgtcttcgccggttgcccggatggctttttcagtacgtaaaatagctgcttccattgcgtagatctggctgacaatgtcggcgatgttgacgaggatttcctgctcctggtcgagcgcttttccgtatttttgcgcggcgagtcccgcgatcatgagcgcggtctttttggcgtttctcagcagatacttttcctgttcgagaacgccgtcacctggttcttcaggcatgagcatcatcagttcttcctgaagagcctttgctttctcaaacagaggaagctcgcctttcatcgcttttttcatgtaggtgcccgggacgatgagccggttgatttcgtttgtgccttcaaaaatccggttaatccgtgaatcgcggtaagcccgctccacttcgtattcctgcatgaatccgtaaccgccgtggatttgaacgccttcatcaacgatataatcaagcgtttcagatccgaatactttgttaagggagcattcgattgcatattctgcgatcgatttcgcaacctggcgcccgtctttttgctcttcttcgctcaaggtgcccattttgtcttcaaacagcccgaccgtacgataaacagagctttccatcgcataaagtttgactgacatgttggcgattttttccccaattaagctgaactttgaaatcggtgtcttaaactgctggcgctgattggcgtatgaagcggacagctcgatgacccgtttcgaagcgccgattgtcccgacagcgagcttatagcgtccgatatttaaaatattgaaggcgatgacatgcccttttcccggttcacctaataggttttcttttggaacttgaacctggtctaagatgagcgtgcgggtcgaagagcctttgatgcccatttttttctcttcaggccctgtggagacgcctgagtagtctttttccacaatgaaggccgagaaatgttcgccgtctattttcgcatagacgatgaaaatatcagcaaaggctgagtttgtaatccattgcttttcgccgtttaatatatagtgggttcccgcctcattcaaaacggccgttgtttttgcccctaatgcatcagacccggagcccggctctgttaaagcataggctgcaaacttttcccccgttgcaagggacggcagatactttttcttttgctcctcggttccgaaaaatacgatcggaagcgtgccgatccctacgtgcgccccgtacgataacgaaaagctccccgctcttgaaaatttttcggtgattaacgccgagctgattttatcaagtccgagtccgccatactcctcaggaacgtcagctccgagaagcccgagttcgccggcttttttcagaagcctgacagaatgatcgaaattgtgctcttcaatttcgtcgatgtacggtagcacatctccgagaatataatcctcagtcgttttggcgatcattttatgttcatctgtgaaatcttccggtgtgaacatctgatcagccgttacctcttcgatcagaaaggcgccgccttttttcatatgatcttttgtttgttccattgttccatcccccttgtgattaaactaattcgaatacccctgctgctcccatgcctccgccgatacacatcgtcacaatgccgaattgctcgcttctccggcgcatttcgtggatcaatgtcagcgtcagctttgtacccgtgcagccgagcggatgtccgagcgcaatcgctccgccgttgacattgactttttcttcatcaatgccaagcgacctgatgacctggatcgcttgcgatgcaaacgcctcatttaattcgaataaaccgatatccgacagctcaagtcccgccatcttcagcgcccttgggactgcttccacagggccgatgcccatcacttccggcggaacgccgccgactgcgaacgaacgaaattttgcgaggggctttaacccgagtgcgtccgctttttctctgtccatgatcatcactgcggcagccccgtcgctcgtctgcgaggaattccctgccgtaaccgagccgtttgccgaaaacgccggtttcaacgttgacagaacgtctttggttgtccccgggcgtacaccttcatcggcagagaaagtaaacgtccgctccttcaggttatgatgttcatccacttctctgacggtgacgtccaccgggacgatttcatcttcgaactttccttccgcgatcgccttggctgctttttgatggctgttgacggcaaatgcatcttggtcctccctggaaacgccgtatttgacggcaacctgttcagccgtatggcccattcccatataatattcaggagccgtttccgccagagccgcgttcggtctgacgatatgacccatcatcggcacgatgctcatcgattcggcgccgcctgcaatgatcgtgtcagcagctccaagcatgattttttcggccccgtaagcgattgattgaagtcctgatgaacaatatctgttgatcgtaacggccggaactgtgtgcggcagaccggcaagcgcgccgatattgcgcgccatattcaagccttgttcggcttccggcgtagcgcagccgatgatcaaatcatcgatattcccttcataaccgcccgctcttttcagcgtctctctcaccgcatatgcgcctaaatcatcgggacggacagtcctcaatgagcctttttttgcttttccgatcggggttctcgcccccgatacaataactgcctctttcattattttccctcctaattacgcaaaggtttgcctttcacaagcatatgctgcattctcgcctgcgatttcggttcgctcacaaggctcagaaacgcttctctttccaaattgagcaagtattcttccgttacttcggcgccgaatggaactcggccgcccgcgatgacaaacgccagttttttcgcaatcttcatgtcgtgttcagagatggcgccggaaagttttaacgattcagcaccgagcaggagcgccgcatagccggtttcgcccgtcaccggaactttctctttcaccggcggacggtagccgctttcggaaagtgtcaggacgagttttttggcatcgtataacaagtgatcctgattgatgctgatttgatcctctgcggttaagatgttcagttctttcgcttcttgagccgaagtcgacgtttttgcaagggcaattgtctcaaacgtcttgatggcggcctcctggatatccggtttaacgccttcaggcagccctttcaagtaatttaaataaagctctttattgcctccgccgcccggaatcagaccgacgcctgtttcaacgaggcccatgtatgattcgcttgaggcttgaacacgggcagcaggcaggcatagctcagtccccccgccaagcgtcatgccgaacggagcagcgacgaccggcttggaactgtatttcactttcatcatcgtctcttggaactgacggatgatcatgtcaatttccatatagttgtcgtcttgagcttccatcagcatcatcgcgagattggctccgacgcagaaatttttgccctggttgccgatcacaagccctttatagttggcgtctacttcctcgagagcaaatttcagcatttgaatgatgtccaggccgattgcgttgcttttcgagtgaaattcgagcagtgcgacatcatcgcctaaatcgatcaaacttgccccgctgtttttcttgatgacgccttttgtttctttgagtgacgacaaatggatcgttttcttgttttcttgaagcgccctgtattcgccgctttcaaaacagtagtagaacgtctttccgttttccttaaggtagaaggtttcatgtccttttgcgagcatttccttcacccagtccgcgaccttccagccctctgcttcaagcttttgcaccgagcttttcacaccgatgctgtcccacatttcaaacggcccttccgaccagccgaatccccatttcatcgcctgatcaaccgccgttatgctgtcggcgatttcccctgtcagctccgccgaatatacaagcgtcggagctgtaatcttccaaaggaggcttcccgccctgtcatcggaataaacaagcgctttcaatctcgctcctgcgcctttcatttgcttggccgcttccagtcccgatgtttttaatgtttgacgcgcgctgtaggtcatcgtcatcggatcgagctcaaggatgtcttttccttcttttttgtaaaaaccttgtttcgctttgctcccgatccagcctttttcgagcatttgttcaataaattcagggagccggaaaacgtttttttcttcgcccgtgacttggttatagacatttttggcaacgtgtgaaaatgtatcaaggccgacgacatcgagcgttctgaaggtcgcgcttttcgggcgtccgatcagcggacctgtaatcgaatcgacttcgcctatcgtgtagccgcctttcagcatttcctgaaccgtcacaagcaagccgtaggttccgatgcggttggcgataaagtttggcgtgtctttcgcttcaacaacccctttgccaagaacgtcttcgccgaatttcttcataaaggacagcacttcgggctccgtttcgtcaatcggaatcacctcaaggagctttaaatagcgggccggattgaagaagtgcgttcctaaaaagtgctttttaaaatcagcggaccttccctcagccatctgcctgacggagatgcctgatgtgttgctgctgacgatgcttccttgttttctgtattgatcgacctttgaaaacacttgctttttgatctccaggttttcgacaacaacttcaataatccagtcggcatctttaatcttttcaaaatcgtcttccatgttccctgtgctgatacggctgatattcttctttgaagtcagcggagccggtttttgctttagcagcttttgtacggctgtccgtgccagccgattgcgcacatccgggtcttcaagggtgcggccttttttcctttcctcatctgttaattcatgcggcaccatatcgagcagtaatacaggaatcccgatattggctaagtgagccgcgatgccggaacccataacaccggaaccgataacggcggcttttcgaatatgcttgaccatgaaagatcctcccccacctttgaatgaatactcattcatttttactccaaaaaaataaactctcctgtcttctttcatcttaaaagattttggaagcgagttcaataacttggtgcaaaatttctgaatttttttcatcgggtatgatcttgccgtgtttacatgtttccccgcttttgggacaaaccaatagagaggaggtgaaggccttggtacgtgaaagaaaaaatccatcttctgccgcagtcagcgccgcaagcataaaaggcaatgcaggtccggattataaaaagacggatgcgggcggtaaacggacaagccaaaaccagcaatataaaaagcataatatggatgttcctgaagatcactaagcccctttaagcatccggtataaatttccgctgtgttaggaaatctaaaaataaacgctaaaaggaggcagacgcatgcagcagcaaggaatgacaacaccgccgccggtcatttcaacgaaggaccatctgtatttgcaggatatgctgaactggaacctgctcgcgatgaaaaaagcgcattttatggcggatcaatgccaggatcagtctcttaaaacagaactcgacagggtcggccaaatgcaccatcaccattacaatatgatattggagcagcttcgtcaaaatcaaacgcaaaacccgtcagcatacatgcaataggaggtcaatgatgaatcagcaaaaccaacagaaaatcggcaatcaggaaacccctgtcccaaagacgagcgcgatgaacgacagggattttgtcaacgaactgctgacaaccgaaaaatatatgacgtcagcatactcgacggcgcttaatgaactaagccatgaatcgctttaccaggccgtacagccgctgtttaacgaggcgcaaaacgctcagcgcagattgtaccaggtaatgtttcaaaacggatggtacaaggtggaggcagaagatgcccaaaaaatccagcagtcctatcagcagttccattctacactgcaagaccagtcgccttatcagcaaaatcaataaacaaaaaataagcagaggaatctctctgcttattttttctgattagccgcccggtgcgcttcattacgttctttaatctggcggattacttcttttatcccctgcttcgcatccggataagctccgttccaatgcttggcgaggggcggcatgcttttggcgatatggctgtagatgatccacatcttaacctgttctttcagttcttcgtccgtttcgcccaaaagcagttccgtatatttctcgaccagtccgtccagctgctccctgagtttttccactcacgacaccctttctttatgtttatttctcgggcatgttctgcatttgacgccgttttcgtctgttgcataatacagacagcaagtcgtgcgtgtccgatcctccgcatgctgtcctggataaaaccttttgagagggttttcgtcctcaccttcatcaaaaaggcctggctctgcttcgtaaagaagaaaacggaaatctcgcgccgcccgtgccttgagcttcggatcttcctgaagcatgtcgtacatccaatacagataaaccgcaatattttcccaaagaatgtgctttgaaatcgagaatgtctgtcgacaggcctcgatcatgccgcccaaatggcgcctgaagatatcttcggtcaattttttcagttcttcggtgcggtccccttcgataagctcagcacctttgtgaaaataaaacgacggcgtccatccttgatcatccgcttctatctcccacgatacggaagccgggtcggctgggagccgttttccgcaaaccgtaaacagatagaaatgcagcgcagcaagcatgccgccgcgcttaacgagcattgaagccgcaactttttgattcggagcgttcagcctgtcttttatagcttctgcataacggcctaaaaaatcctcatcaaggagcatgtttcctttaacagagaataaggagccggtctgcttcgttccaaggcggaaacgaagcaatgactcaagctcctcttttgttaaattaagcatgggactgaaccacctgctggacgatgcatcttccttttccgtacggaatgcagtgcggcgtgccgaaaagcggatctttcgtcacttcgcagtccatttcaaaaacgtcctgtacaagcttgcagttgataatggattcaggccggccttcggcatatatctttttatctttaatcgcgacgaggtgatgggcgtagcggcaggcgaggttcaaatcgtgcagcaccatcacgatcgtgcgcttttcgtgttcatttaattcaaacaataggtccagaatttcgatttgatgcgtcatatccaagtatgtcgtcggttcatccagtaaaatgatatccgtttcctgggcgagcgtcatagcgatccaagcgcgctgccgctggcctcctgacaaggaatcgactgtacgctcagccagttcttccattcttgtcgctttcaaagccctttgcacggcctcttcatcttctgctgaccattgcttcagccagttttggtaaggataccgcccctgcttaacgagctggagaacggtcaagccttccggagccgaagggccttgaggaagaatggccagctcctttgccacttctttcgtcggaagcttggcgatggagctgccttcgaggagcaccgaaccgccctttggcttcatcaaacgtgcgagagaccgaaggagagtcgacttaccgcagccgttgctgccgataaatacggtgatttcaccttttgggatcgttaagtttaactcatcaataatgattgtttctccataacctaagcttaacgtttctgttgaaatggcactcataaatgaaatctctccttttattggtttctgcttttatacagcaagtagataaagtaaggggcgccgatcgcggcggtaaacacaccggcaggcacttcaacgggagaaaaaagcgtgcggccgatgatgtcggcaatcagcacgagcaatcctccgatcagcgcggcaaccggcaagagggcgccgaatgacgatccgacaagccttcttgcgatatgcggggccatcaaaccgacaaaaccgacagttccggcaaaagcaacggcgattccggcaaaagcagtgctcagaagcaggagcaaaaagcggtttcgctgaaccgagctgcccgctcctgtcgccagttcttcgccgagcgtctggatattgacgtttctggcggcggctgccgatatcagcaaaaggacaagcgcagccggcaataaaacgttcacatcctgccagttggagccatatactgatccggtaatccagacgttcgcctgggacattctgtatatcggtccttttatcataaacaatgtcgtcagcgactgggcaagcatcgaaaatccgattccgatcaaaacgagcctgaaagttgaagagccgtttttatatgaaagaaaataaacgagcattccggcgagggcagcgccgacaaatgcggcaaccgggagccagctgatgctgactgtaagcgcattgtttttatcggaaaacagcattaaaaacaagacaacagcgactgaagccccgccggtcacaccgatgatatccggcgaagcgagcggattgcggatcagaccctggaggatcgatccggcagccgccagacagattccggcaaacagagcgaccaaaatccgcggcatcctgaaggacatgataatcaggtcatcgcccggatcacccatgcccaaaaacgttttcgcgacggctcccggcgaaataaaacgttcgccgatgccggcgctgaggacgacggcacaagccgtcaacaccaataggatcatgaacgaaaacagcgcttttttgccgatcaacagtgaaatgccgccttttccgattctcagcgtgcggtaatttttcatttttggaacccccttctcgcgatatagacaaaaatgggtgtcccaatgatggctgtcatgacgccgacaggtacttcttcaggcatgatcaggtaccttgcgccaatgtctgcggtaacgagcaggatggctccaagcacggcgcagtacggaagaacccagcgatggtcgtgcccgacgataaatttagcaaaatgcgggatgacaatgccgataaagccgatcggcccggccacggcgacagatcccccggctagcaggacaatcgaaaccgccatcagcgctttaatcagccacgttttttggccgaggctttttgccacttcctcccccattgttaagacattgattttggatcctagcaaaaagctgatgatgaatgcgggcacgatatatggaagaacggagaccaagaggctgaggtcgcgcccctggacagagcccgcaagccaaaacagcgcctgctcaagagctgcttcattaacggaaagcattccttgcgtcagtgatgagaacagcgctgacatcgccgcccctgcaagcgtcagcttgaccggcgtcagaccttcccttccgagagagccgacaaaatagacgacaagcgcggcaaaggctgcgccgaaaaatgagatccatgcaatcgcctgaagcgaactgacatgaaagaaaaacagcgctccaacaacaaagaagccggcgcccgcattcacaccgaaaattcccggagaagcaagcggattttttgtcatcgcctgcattaaagcgccggctaccccgagggaagcgccgacagttgcagcgatcagcgcgcgcggcaaacgcacgtttttgatgaccagatgttcattagagccgctgaagtccgtaaaagccttgtaggccatcgaccatgacgtattcgtataaccgtatacgatactggcgcaaacggcggcagccagcaccaaaataaacgacagtagtgcgattgttctatatttattcgttcttaagagcataaattaaaattctcctagtttgactgaaacatctactggttattgtatcagataacactgatcttgaaaatcattttcaattaacaattgacaaaattctgatcaaaaattatgatcaggatgaatgacttacatacctaaggaggacacacatgaagagatggtctattgttggatttatcgctttgttagcgatttcaattcttgcagcctgcggcggaggcaaagatgactctgcaaagggcggagagaataaagatacgatcaccgttaaacatgcaatgggtacggaagaccgagtgcctgcagacccgaaaagagtcgtcgtcctgacaaatgaaggaaccgaagcgcttttggaactcggaatcaaacctgtgggtgcagtcaaatcctggacaggcgatccttggtatcagcatattcaagccgatatgaaaggcgttaagcaagtcgggctagaaggcgaaccgaatatcgaagcgattgccgagctgaagcctgatttaatcatcggaaataaaatgagacatgaaaaaatatacgacaagcttaaacaaattgctccgactgtcttctctgagacgctgcgcggagaatggaaagacaacttctctctctacgcgaaagcggtgaataaagagaaaaagggcaaagaaattttagaagatttcgataaaaaagtcagcgaattaagcgacaagctcggcgaccagaaaaagaaacgggtgtcggtaatcagatttatggccggccaatcaaggatttactataaagattctttcccgggaattatcctggatcagctcggattcaagtatccggaaaaacaggaaaaactgtttgagaaacaagacgacaaatttgtttttatgacggaaaataaagaatcgatccctgatatggacggagatgtcctgttctatttcacatataaacctgccgaaagcaaaaaagaagctgaaacatggcaaaacgattggacaagcgatccgctgtggaaaaaattgaacgctgtaaaaaccggaaacgcccatgaagtcgacgatgcgatctggacgacggccggcggcgtaaaagcagcgtatctgttccttgatgacatcgaaaaatactttttaaaatcttaagcaaaaaagggcatttccagtttggaaatgctcttttgtttattttccgttatagattctggacgtgccatcaggccatttcacccgcagctgaaaccggtcatattgttcgtcaagattgaaggcctcgagcacattgctgatcacgtcctgctctgaatcggatttggcgatcgaaagctcgcttaaaaccattttcatttcgtttaaagcttcctccccttcgcggtccgctccgttcagatagtctttaatcgatgcttcttcccgctcctgtttgtcgtatacggcttcaaacgtattgtgctttccatggccatagttcacttccaatgcaaatgtatcgtaaggcacgcttttcacatctgaaacaggggcgttatcgggaacggcctccttgccttccgcatgttcttccgctatggagccgcagccggtcatcaggatcaggacgagagcgataacggccatccgaaattgattcatcccgttcatctcctctatgcacattatccttagctatgtccactttgcggaaactcattcaatctaagcggaagcatttatgtcatcgctaaaaatgcttctgcatctcggacagccggctgaatggccgcttcccagaaatcccgcttcgtcagatcggcgccgagatgcttcatggccagttcttcaacagacattgaggctgtatcttttaagagagcaatatatttttcttcaaatgccgcaccctctttcagcgcttgcgcgtaaatgccaagcgaaaacaagtagccgaacgtataaggaaaattgtaaaacggaacagacgtaatataaaaatgaagctttgatgcccaaaaatacggatgatactcgccaagcgcaccgcaaaacgcttctttctgagcttcttccatcagttcgttcagccttccggcggatacgacgccgttttttcgttcatcgtagaagcgggtttcaaataggaaccttgcgtgaatgttcataaaaaaggcgacgctccgctgaaccttatcttccagaaggacgattttttcttcgtctgaaccggcttgttttaacgccgcatcggccacgatcatttctgcaaaggtggacgccgtttccgccacattcatcgcatacgccctgttcagcggcctgacgtccagcatggattcctgatgaaaggcatggccaagctcatgcgccaaggtggaaacgtttgactggcttcctgcaaatgtcataaatattcttgattccccgctgtcaggaaaattggcgcaaaagccgcccggacgttttcctcccctgtcttcagcttcaacccatctgtctctgagcgccttttcagcaaaggaggagagcttttttccaaacgttttaaactgcccggtaataaaagcggctgcctcttgatacgaatattcctttgctgctgaaccgatcggcgcttcgacgtcataccagctcagtttatccagtccgagcaaagacgccttccgggaaagatagtctgcaaacggctttttatgatcaataatgacctgccacatgacatcaagggtttcctgcttcatgcggttgatgtccagcggttctttcaatacattgtcccagcctctcgcctcatagacgttcagtctgaaaccggcgaggtgattcagcgtgctgctgagcaaatcagcgtgctgttcccagccgtggtccaaattttccgatacggagcggcggatctttctgtcaggtttagatgtcaggttctgcgcctgtccgacagacagaattttcgtctcgccatcttcttcatacggaatttgaatttggtcgacgatgctgtcgtacatatcgccccaggcatgatatccgtcaacagacaagccttgaatcaatgtttcctgttcggaactaagcttttccgttacccgctctcttctctcattcaaaatataagcgatatcggaaatgctttcatcttgaaggatcgcttcccattctacatttgggacaacggcaaatttgctgtcaagcacgaccagcgccttctgcgcatcggcagcgagccgggtgacctcaaaattaagggcattcgcctttaaatccgcggtgtcctgggcttggagacatccgacaaaagcgtctgcttcgcggattttaacatcaattgtttcaaaaagcgccagcgtttctttcaattcatcaaggccgctttttgagacggtaagagcctcggccgaacgtttaaaagttgaaagcagtgttttaatctcatttaaatattggcggaattcggcggagccgctcccgcctttaaagaaaacctcgagatcccacgtatccttaagttgatgaaatgtcattgttcccgtcccctttcattggcttgtttccattataagataaatttgccttttcagggcaaataaaaaaacggccggcttgtgagccggctcgcctcttcccttatcatattacagctgcctcatccgcttgaccgcatagctggccgtcaataaaccgattaggccgaacacaaataaaaacaatccgcctttactttgcggttgaccctgaatagcatctgtaccgtttgtcatttccgcgctgaatggttctgcgatttgcagggcttgaagcagcctgccatcctcccctttaatgttaaggattccgtccgtgtctacattttcactcagaacttcgcctttctttttcgtaacgtataaagggtccttcagttcatggctcgtcccgttctggtccgtaaacgcttctccctttttgagttcttgtgtctcgaaattgtgaaatccctcatccagaagagcttttgtatcgctgtacatcattttcttgctatctgccttcatgacgaccgcgattaaatcaaggctgccccgcgttgccgtcgtgacaagggtatgctttgattcatccacaaatcctgttttgccgccggttatacctctgtaaggaatctcacccgtcagcattcgatgatggtttttaagcgtcgtgtcccatgtctgtccgtgccaatccgtttgcttttccgaaaaaagcgctcggaacgttttgtttttcattgcgtactcagtaattctcgccatgtcggcagacgtcgtataatgatttttgtcaaacagcccgtgaggattcataaaatgagtgtcatgcactccggcatgttcggcaataaacgcgttcaaatcatccgcaaactgtttcacgcttccgctgagatgttcggcgatcgccgtaccggcgtcatttcccgaattcatcagcagcccttggagcagccgttttaatggaaccgactccccctcttccagatatacgcttgatccttccgtttgagcggcatttttgctgactttcacacgatcttccaaatttccgttttctattgcataaatcgccgtggcaattttggttatgctggctggatacatttttttgcggctgtttttttcatagaggacctggcccgatttcccatcgatcaatatagcggaaacgcttttgatttccggtttgtttttttctcctgcttgagccgagctatgaaaaaacagcgtcagacatagtacaataatgaacaggagggatcgtttaacattcatcgtgtcaccctgccttctttctcttttgcaatttttataaaaataggtcttttagcactttttaaattttaccaatgatgaactgtcgctgacaagccttttcttgtcaacaagccaaaattttgaatggaggaaactcattgaacaataaaatcgcaattgtaacgggcgcgacgagcggattgggtttattgaccgctttaaaactcgcaagcactcatttcgtaatcgcaacggcgcgccatccagaaaaagcggaagctctgcggaaccgtatagcggagctgtcgatcgagtcatcgattgccgtcgctgaacttgatgtcacaaacgaacaatcgatttcctcattttccgaagagctgaagcagtacggacagatagacgttctcatcaataatgcaggaacggcatacggcggattcgctgaagagctttctcttggcgactacagaaaacagtatgacaccaatgttttcggcctggtggcagtcacaaaagcggtccttccttatatgaagaaacacagcggcgccaaaatcatcaatctgagcagcatcagcgggcggatcgctttccccgctttctcggcatatgcttcatcaaagcatgcagttgaaggcttttcagaaagcctccgcctcgaactccgtccattcggcatcaatgtggccgtcgtccagccgggatcgtaccagacggcgatttgggagacatcgtttgccgcccaagtcactgtacctgatgccgaatcacagtacaaaacatatttcgagcggatatccgcctacattgcagcgagccgcaaacattacggaaacccggatgatgtggctgaattgatctgccgactcgctgcaaaaaagcggctgaacaggctgcgctatccgatcggcaggggcgtccgtctctcgatccttctccaccaaatcctgccatggcagatttgggaacgtgcggtcataaaaaaattgcttaaataatgttatttaaaataattataatttagtattgattttaattttatatttgttataatataattaacaaatgaaaaacacgaggaggaaatatcatatgatctctcaacaattaaaacagcaaaatcctgtacttgaaaactcaatgaatacgaatttgtcaaactggttcatcctttacacgaagcttcaccgttttcactggtatgtaaaagggccgcagttctttaccctacatgaaaaatttgaagagctatacaaccatgcgtcagaaacagcagatgtgatcgcggaacgcttgctggccatcggcggacagccgctcgccacaatgaaagaatacattgaccacggcacaattgaggaaaacggagccgaaaaaacggccgaagaaatggtttccgcactggtaagcgattaccgtcaaatccgcgatgaaattcagcataccatcgaacttgcggaagataaatcagatcattctaccgctgacctttatatcgccctgacagaggaaattgataagcagatttggatgctttcttcatttttggacaagtaatatgaaaaagccatggcgtttgccatggcttttatttatgatttgcttttcgcaagttttgctttcattgttgtttgctttccgtttctcagcacctcaaatgtgacagtatctcctgcttttgcttctgtataaagaatttttctgaggtctgaggtggtttcgacgtttttgccgttcattttggtgatgacgtcgccggctttcatacccgcgtctgccgcaggcgatttcggcgatactttatcgatgtacacgcctttattaagctggtctccgaaaaggccgagcgtattttgctggtactgttcaggcacctgctgcatatcgatcatttgcacgccgaggaaaggccgttccactttccctttttccaaaagctcgtcaacgatcggctgaacatcgttgctcggaatcgcgaagccaagcgattcaacaccgctttggctgatcttcaggctgttgatgccgatgacctgcccgctgctgttaatcagaggcccgccgctgtttccagggttgatcgccgcatctgtctgaaggacgttcatatcccaattcccttcagatgttgagacttcaatcgtccggttgacaccgctgatgatgccttctgtaaccgttcttgaaaattgaaggccgagagggttcccgatcgcaattactttttcgccggcgcgcagttttgcggagtctccgaaacttgcaaccttatcaacgcctttgctgctgatctctaaaacagccagatcagtcaaagcgtcgctgccgataatcttggcatccgcggtctttccgttgtataaggagatggtcaccttcgaggcgccttcaacgacatggttgtttgtgataatgtaggccttgccgccgtctttcttaaagatgacgcctgatcccgtgccgctctcctccacgtcgtcttcagagaagccgaagctcgtttgaatatttgaaactccgacgatcgcaggctccaaatcttccaccatatcaggtacgttatctgcgttcgtgacaggttttgtggtgaaattctgcgactgctttggctctgtctgtccggttccggcagtttcgctcggatgatcgcccggcagatacggggagattccaagcaccaagccgcctccgatgatcccgcccaaaatcgggctcagccacgaagccttgcgccgcttttcttttgccgctctcgtttccctggcatcttccagggctgcagcggtttctttattcgtaagatctgactgatcgtctgtatccttctttaaaatcagctcgggctcctttgccggctgttctgactgctgctcctcagaacctgccgtttgcggcgtctgcgcttcttcgtgaaactgctcttcatttgcatgtttttgttcgtcatcgcgtctaaaatccataagcgtacacttcctttatttttcttgtcttcaactatcgcaaatggcattaaagctttaacatccacaaaaaaagagacccggccatcgttcactctgttttcattccctttcttccctgatgaatatgttacgaaaacattgtgggataaaaatgaaaagaatatgtgaaattatgaaaattgaccagacttatgttaaaactagtataatgacgtagaaaggatgtgaaccgcccttgtcatactccatttatctagttgaagatgaagagaatttaaatgaattgctgacaaaatacttagagagtgaaggctggcacgtcacttcttttctaaacggtgaaagcgccaggcaaaaaataggccagtcacctcatttatggattctcgatatcatgttaccagatatcgacgggtatacgctaataaaagaaataaaaaatcaagatccggaagtccccgtcatttttatttctgcgcgcgatgccgacattgacagagtgctggggctcgaactgggcagcagcgactatatatctaagccgtttctccccagggagctgatcatccgcgtgcaaaagctgctcaagctgatttataaagaagaaccgcctgagaagaaaaaaggaacgccggtttcctgctatgaagtctatgaagacttgagagaagtctatgaaaatggcagcatgatcaatttgacgtcaaaggaatttgatcttctgcttctatttataaacaaccagggccgcgccttttcaagggaggatattctcaccagcgtctggggagtcgattacttcggaaccgaccgcgtcgtcgacgatcttgtcagaaggctgcgcaagaaaatgcccgaactgaaagtggaaaccatctacgggtttggctacaggatgttgaaatcatgaagaacaggtcgctcgcctttcaaatttggagtgtcatttgcggcatcctgttaacggtctcgattttgctgacgtttctattctcgacgacactgcagaactttttcactgatgaaatttatacaaacattgaaaatgagcagcatgttctgacggaatacggattttccgattcaccggaaagaggcttcggcggaagcagcggctcgcgaagcacaaaccgccacgttcagcacgtcctgctgcctgagaaaggaaccgtctatcagagcccgcagattctccccgattcatttatcgagaaggtgcagaagctcgggaaaaggcaggacgagtcatcgaaaaggtattcggagaatgtcaacggagagcacgttttctttgtgctcaaaaaaatccagacccaggaccagacgtttctgttgttatcctatgcgcttgattcatacagggacgatttgtctcatacgctgtttaagcagctgctgtttattttgatcgtcgtcattttgctgagctggattccttctatttggctggcgaaatatttatcaagaccgctcgtcacgcttgaaaagcacgtcaaacaaatctctaaacaggattgggatgatcccgtgattgtcgacagggaagacgaaatcggcaagctggggcacaccattgaagacatgcggcaaaagctcatccagaaagatgagacagaacgcacgctcctgcaaaacatctcccacgacctgaaaacgccggtcatggtcatccgcgggtatacccagtcgatcaaagacggcatctaccctaaaggagatttggaaaacacgattgaagtcattgaaggcgaagctgaaaaacttgaaaagaaaatcaaggatcttctttatctgacaaagcttgattatttgctgagacaagaaagacagtacggaacttttgatatacaagaggtcattaaagaagttgttgaacgcttgagatggtccaaaaaagaattgaactggaagattgatcttgaagaggaaacaatgttgacgggcgatcaagaacaatggagcaagctgttggaaaacgttcttgaaaaccagatccgctatgcggagacattcattgacatcagcgtcagttcgacgaaagaacatacgttgatcaccattaaaaatgacggaccgcacattgaagaagagatgctttccagcctgtatgagccttttaataaagggaagaaaggcgaattcggcattggactcagcatcgttaaacgaatcttaacgctccaccatgctgacatgaccattcggaatgatcaaaccggtgtgtgctactcaatatccgttccgagaaattagactgtagacgctgcagtcttttttcatataaacgaatagccgttgaaatcccggtagctcggcttcactgtgttttttggctttttcatccatttcttttcgcacaggacgtgctttggatatttaactttgtccaccttaattcccctgctgcgcaggcgcctgatcatgtcatcgatttctttcatcaaccttcaccctttctccgcaaattttgaccactcggtcaccttactttataatataaataatatcaaacaaaaaaacaagttacaatctagttaaaaatataacggagcaaaaaaagtgacccgccagtcaccccggtccgccgaaagccgcttttgggttcgatctttcaggaaggtgaaagctatgaaacaaaaagagaaagtcattattgaaacagccatcaaacttttcgctaaaaaaggatacagttctacttcagttcaagagattgcaaaagagtgccaaatgtcaaaaggcgctttctacatttattttaaatcaaaagaagcgctcctcctttcagtccttcactactactatgaaagaatctttacccgaatccagaaaatcaaaacggagcatgacaatccgcgcgatgtgtaccggatgcagctcgtcgtttttttcgaaaacattttggagcataaagagtttatcacgatgcagtttaatgagcggtcgatgccgatcaatgaagaaattgaggcgtttgcgaaaaaaatgcggagaaccacgctcaggctgcacatcgaaaacatccagaacatttacggcaaagacattgaaccgtacagcgccgaactgtgctttatgatcaacggaatgagcgatgtctaccttgagctgatgattttgctgcaccattcgttcgacctgcagtctctcgccgaccacatgctgaaccgcctcgacgatttggcgaaggggatgatcaagcgcaatgaccagccgctgatcccattcgaaaaagcagacgagtggttcggcccattttacacatttgatccgctgaaggacgccctgctcaatgaaatgcgcgtcaaagcgaacaagcagtacaacggcgctcctcctgcagaccttgccgaaagcctggatattctggagaaagagctgagaaaagaaaaacgcaaaaacgccattatcaaaggcatgatagccaacttgaaggaatatcccgcgattcgaaaagaaacggacaaactcgccgaattgctcaaaaaagacatgcaccatccgcacggatgatccgcaaaacaaaaccggctgcaatgcatgcagccggtttgttgattatgctttcggtttcaccatttcttcaggtttaacaacttcgtcgaactgctcctctgtcaaaaggttcagcttgagagccgcttctttcagcgtcagcccctctttatgagccagcttcgcgattttcgcagcattttcgtatccgatatgcgggtttagagccgtaaccagcatgagagagttggtcaggttcttctcaattgtttcccgattaggttcgattcctacagcacacttgtcatggaatgaattcatgccgtcggcaagaagctgaacggattggaggaagttgtaaataatcacaggtttaaagacgttcagttcaaagttcccctggctcgcggcaaagccgatcgttgcgtcattccccatgatctgggatgcgaccattgtcagcgcttcgctttgcgtagggtttacttttccaggcatgatcgagcttcccggctcattttccgggataagcagctcgccgattccgcagcgaggtccgctcgcaagccatctgacatcattggcgattttcatgagatctgccgcaagcgctttaagcgccccatgcacgtgtgtcagttcatcatggcttgtcagcgcatgaaacttattaggcgagcttttgaatgtctgcccggtcagagcgctgatctcttcggcaacggtgctgccgaattcagggtgggcattaatgcctgttccgacggcagttccgccgatggcaagatcgcggattttttcagcagcttcaagaatcatctctttagagcggtccagcatgtatacccagccgctgatttcctgtcccaatgtcagcggtgtcgcatcctgcaaatgagtgcggccgattttgacaatgtctttgaaagcttcagctttttcatgcagcgtgcttctcaagcggtcaatcgccggaatcagtttatcgtgaatcgcgaggacagctgccacgtgcatagctgtcgggaatgtgtcgttagagctttggctgcggttgacatcatcattcgggtggattttcaggcttgatcctttttcctgcaaataagccgttcccctgtttgccacaacttcattcatattcatgttgctctgtgttccgctgccggtctgccagacgaccagcggaaaatggctgtcatactttccttctaaaatatcatcgcatacggaaacaatcgcttcctttttttccgcctcaagatttccaagcttttcattggcaatcgcagcgcttcttttcaagattgcaaacgcatacacaatttcctgcggcattttctcggaaccgattttaaagttctccttgcttctttgggtttgggctccccaaaacttatccgcgggaaccttgacttcacccatcgtatctttttcaattctgtagtccactttcttatcccttccttctctaattctgcaatattctatatttcgataaaaatcgataaaacccttccatttaaattttatctttattttaattttagctcaatataaacccgggtatcttttgcatatttatatttcggatttgttttaccgtattctttcgatacatatgaaacctcataatgcttagaaaaagattgaataatgcgttcaatctcctccggtttccccgtaagcctgatttgcgccaactttctcactccgtctctgttcaatgaaaatttcgccaaacactactgtaacacagtatattgtttttttaacaggaaaagataacctatacaactccagaaacaccagggcaggtgacgatcatgactcaatcggaattcaaggaacacatccatgaaaatctcgcaatgctccttccccatctcgagcataacgatgatctgattcaaaataaaaaaatgctgaaaaacggaatcattttttactttttgtactttaaagatttgaatgatgacaagaaaatccagaaggctgcgaaattgcttgtctccgatgacagctcctattcattggaggatgtccggctccgcttaaacaagctgaatgcggaacccgttacagcaaaaaaggacgcgattaacgcaatcttcaaaggaaaatgtctgctgttgatcaacggtttgaatactgtatttgcactgccgacagctgagaaaaagaaaagaagccttggagaagtgaatacagaaaacgtcgtcagaggcccgaaagtcggttttatcgaggatgtcgatacaaatgtggctctagtcaggcagcgtgtcccggataaagaactgaccgtggaaaaaatcccgctcggcaagagcaagtttaaagacgcgaccattctctatatccagggcaaagcggacgattcgatcatcaaagatcttaaaaagcgcctgaaaaaagttcagctggatgatattcaagataccggcgttcttgaagaattaatcgaagataataagtactcgccgtttccgcagatccagaataccgaaagacctgacaaggtttcttcagcgctgtttaatggacggatcgcaatttttgttgattacacgccatttgccctgatcgtgccggcttctttcggaatggtgatgcagtccccggacgatttttacgaaagatggatcgccacgaccttgatcagatctcttcggttcagttcgattttcatcaccctgttcctatcggcgttttatatttcgcttgtatcttttcatcaaggcatgctgccgacggctctcgctgttacgattgcgagcacgcgcgaaaatgtgccgtttccgccgctccttgaagcgctgattatggaagtgacgatcgagctcttacgggaagcgggactgcggcttcccaatccgctaggccagacgatcggcctcgtgggaggcgtcgtcatcggccaggcggcggtcgaagcaaatatcgtcagctctgtgatggtgatcatcgtcagcattatcgcccttgcttcatttactgtgccgcagtacggcatgggcctgtcgtttcgcgtgcttcgttttatttccatggtggctgcagccgtgttcgggctttacgggatcatattgtgcatgctcgccatcttcacccatttggctaggcaaagaagcttcggcatcccgtattttaacccgaaccattttttcagcttaaaacatacggatgaagccattattcgtctgccaacaaaagctcgggaggtgaaccgtaaaaatggatccaaaaaatcagcacgatcggattagcacgtatgaagccgcttcgatcataaccagcacaatgctcggcgcaggcctgctgacgctgcccagggcgctgacgcaaaaaacgctgtcgccggacggatggatcgtattaatctttgaggggcttgtcttttttctcattatctacatcaatgcaaaaatcgttaaaaaacacaacgtcctgtctttttttgattacacaagagaaggctgcggctttataatcgggaatattctcaacctgttaatcgttttatacttcatgggcgtggccagctttgaagccagggcgatggctgaaatggcaaagtttttccttcttcagttcacgccgatgagcgtgacgattttcgcttttatcgtctgtgcaatttatttggttgtcgggggtatcagcgatatgtcaaagatattcccgttcttcctgtccgttaccattgtcattcttctgatcgtctgcggactgagcctgaatatgtttcagctgaaccatttgcggccggttctcggccttggtttggagccggtcagcagagctttgacggtcgtttccatttcatttttaggggtggagctgatgatgtttctgccgaaatacgtcaaaaacaaagaaaagctttttaaggcatcggcgattggatttgggataccgctcttcttatatatcctcacctttgcggtcgttgtcggggcgctgaccgcgactgaggtcatgacgttgacatggccgacgatctcgttgtttcagtcttttgagataagagggattttcatcgaaaggttcgaatcgtttttgctcgtcatttggacgatccagtttttcacaacgtttgtcgtctatacgtactttgccgcttcaggacttgaaaacgtattcggatggcctgtgaaaaaaaacgtcctcttcatcggcgtaatcatctatctggcatctcttgtacctcaggacgccaatcaagtagtcgccttcagcgattaccttggatatatctttatcgttgtcttctgtgcacttccgcttatgatctttttgctcgtgtccatcaaaaggaggtttacttcttcatgaaaaaaaagggaatgttagcagccctttctctgcttctccttttaacaggctgctgggacagcaggcagatcgaaaagcttagcatcgccatcggccttgccctcgataaaggcgaggacgataaaaacgtgaaattgacgtatcagtttcttgttcctaaaaagatcggacaagacggcagcgctcaggatccgtctaaagtggtgtccacctccggaaacacggtccatcaaaccatccgttccaccgctttgaaaaatttcccggtattctcgcagcatctgcaagtcctgattttctcagaggagcttgtatccgatatttctctggaagcattgatcaatcaatttattagggacaacagcatcagaaggagcagcgaggtctatatgacgcccggagctgccggcagcatactgaaggttgatggtgcaagtgaccctgcgtccgacgtgatccacagcatctctgaaaacagagcttcgacgatcaagctgctcaagcccgtcacattgaacgatatttcgattaaaatgcagtctgatttatcttatatcatgccgaaggttgtgatcgaaaaaggacagcttcagcttgaaggcggcgccgtgatcaaaaacaacaaataccatgcaaacctttcgccgtctcagatcgaagcgctgaatttattaactggcaatgtcatcggcggagtgatcgactcaaggcatgatggacatttgttctcgtatgaagtgttttcgatgacccaccgcgtgcgggcgatgaggcagaacggaaagtacaaattcgtcgtaaatgccaatattaaaggaaggctgtcagaggactggtatcttggagaggattcttttaatgaccaatatataaaaaacatagagaaatcggttcaaaaagacatcaaaaagcgggttgagcagctgatccatgtcctgcagcacgatatcaaaacggacgtcaccgatttttccgacaatgcgcggatcaattttccgaaggagtgggaaaaagacagattcaattgggacaaacacttcagcgaagcctatatcgactatcatattaaagcgacgattcaggactttggaacaaaaggtgcgacaaaaagcagatagcgccccgtttttctgatagaatgtgtttgaaagggtgatgagcttgaagcggatattgcacatgacaggcatttttttgattgcagcggcagtcattctgtccggattcattatcagtgatgtcgcctatgatccgtttatggaggattcgcagtcgatgcttttcttcacgatcggcacatacctcaccactccgtttttttgcttcatcggcggattcattttgctaggcatcggcaagttgatcgacttgccggagaaacacaatgccatagtggccgagcggctcgacatcatttgccaaaacggtacagcgggcgaacatgcacgcgaagaaaacgaggccgcccaacttaccgcccgcacggttgaaacagattcattcactcttcctgcagccgaggatcgaaaatattggaacggctgaaaaacggctttcttgagaaagctgttttttgtttgatcagtcgacaagtttgtttcggtgggcgtagattgcggcttgtgtccggtcgtcgacttcaagcttggaaaggatgttcgtcacatgcgttttaactgttttaatggtgatatataattcttcggcaatacctttgtttgtcttgccctctgctacaagtttgaggatttccaattctcttgccgtcagcgattgatgaaggggctgttcgccggctgaatgtctcagcttggacaacacttttcctgcgactttggcttcaagctttggttctccgacgctcgcagccctgatcgcatcggcgatttcactcgctttcgacgttttcagcaaatagctgagcgctccggcttcgatgaccggatagaccttgtcatcatcaacgaagctcgtcagaacgatgattttcggatcggcaagctgccggcatatttgtttcgtggcctcaattccgtccatcccttccatcacaagatccatcaaaatcacgtcgggtttggtttcaagcgccaattcaacgccgcgctttccgtctgatgcctccccaatcacttcaatatcaggctgggattccaggaaagcggccagccccattctcaccatttcatgatcatcaattaacaatactcgaatcaccttttaagcctctcctttttgttgttcaaaaatcggaacctttacatcaacctgtgttccttttcccgtaaatgaaatgatttctgccactccgccgacttcgctggctctttccttgatcgagttcagcccgtacgaagatgttttgacggcatccatcttaaatccttcgccattgtcaatgactttcaactggagctgtttgttcctgagcagcagtctgacggtgacttttgtcgcttttgaatgccggaacacgtttgagagcgcttcttgaacgatcctgaacaggtggtcttccacacctttcggaagtttgcccgcatcctcaatctcccaatcgatgtcgatcgactgtttcgctttaaattctttcaaaaggtctgcaagcccttcttgtagacctttcccttcaagcgtaacaggtcgcaaatgcaaaaggagcgccctcatttcattctgggcatcggccgccattttttcgaccattttcagcctttgagcgagcttttcatcagccgcagcatcgattccctccaaaacagctgaagtcatcatggaaatcgcaaacagctgctggctcaccgcatcatgcaattcgcgcgcgagacgctgccgctcttcggagatcaccgattttttcatttgatcctgccattccgctctctcattggacagcttttgcaaagaggcaacctgtctttcgatccgttcggccatctcattgagctggtcggcggccagcccgatctcatcgtctccaagcgatggaatccggtaggcaaagttgccgttttcgtactttagaatagactcgatcagcttttcaagccgttttttcagctgattgccgaacatatagcctgagccgaacccgacagctgtgctgatcaatgcgagaagcgcgataaacggaatcccgaaccacctggaaacgatgagcaccctcggatccagctggtaataaaacagcataaagcccaatacagcaagaaaaatcgtaaagctgacaccaagggataagcggacggcgcgccattgaatgtttgcaagtctgttcgttctcatatgaaccgcacatccacatcgccgataaacagcgaaatcgaaattttgacccgtcgtgccgactgctcgtaattctctgtctcggaatagatttgattgccgatgccgctttttcggccgccgatgacgtcaatgtctccaacgaatgcagaagagctgatggacacctcaagatcggacggaatgtaaatatcgacatctccgatcaaccccgtaatgacgatggtgttttctccctctgaaataatcgcctttgacaaatcgattttcacgtcaccgataaacccggagatattcaagtcatttaagtcaaaaggtgttttcatcaattttacatcaccgaaaaagaagctgcgctggccagggctgttcttctcctgaagcggcttgaaatccgccttttcctttcccctgtctttcggcttatggcggtcaaataccggctgatttgtcaccagccggtaccccgcataaattaagaaagcggcaaagaaaaagccgaacaggctgaatgtaatgctgaagatgtctttcagcagcagaaagcctgcaaaaatatacatgacagacccgagccagcggcgggaatatttgtggagaaaatacccggcaaaaagaaaagcgagcggccagaataacgcgtctccaagcccgctgttttgcaaaaatatgctgattccgaagagtacgatgatcagtccgatcagctggttttttgtaagacgcatgctgactcgagccccctttcttcttgtcgattactcaattgagacattcccgctcgtaattgagatgtcgattttattttttccatttcctttttttccagtcagcgtccgcttctcattggcgacttggtcaaatgaataggaatgactgatgtttccgcttgtcgactcggcttcaagactgatgtcggcatcatcgggcaggctgagcttggtgtttccggatgtctgtttgatgctcagagaatcgttgatctctgtaaaggaagcgcgcaaattgcccgaagtctgtttgatgctgagtttgccggtgacattttcaagttttgtattaccggatgtggagcggatatcagcagctgccgtttgaacgttttccagcctgaccgatcctgacgtcccttttacagaaaggtcttccgcctgaaggtcatcggccttgaggctgccgcttcccgactttaaggctacatttcgcaaatgcagaccgccgccggacagtttgacatttccgcttccagaagaaatcgacagatcatctttatattcagaagggatcttgacaatcagctcatttttcttccagaaaaacggccaaaagcctttcgaatgagcggaaagctgaagagtacgcccctgttcggacgaatcaagccggacgttttttcctgaaatctcggcttttatatcatcgcggttttcagcttgaatgttgactgttatactctttgcatcaatgtcaattttatcgatgtcttccgcctgtgcatgatatgtgcgggctgactcttcatcgaagccgaagaaagaaaagccttcacgcccattaaacatcatgcctgcaaggatgagaatgccggcgatgatcagcagttttccaaccgtttttttcatttagaaaaccctttcggctagtaagtgtatgctccttattataaggaaaatggtctttgaaagaaatcaaaaattgcataaggggctgtgagagcccctattcgtttatgcatttcccgcaggtgtctgcttttccaagcctgtctttttagccctcattttttccagctcttcttccacttcttttgcatattcaaggcggccgaatgggctgcttgatgaagctgataattcagcatagctgttcacccttgtttccatctcttcaatccggttttccattctcataaattcccggtaggcgctttcgctgtcgattttattaaatgatgcattcatatgttctttcgctttcaccgcgtttgccctggcgatcagcgcatgctttcggtctttgatatcgcgcagtttaacctcaagtgtctccagctgttcctttaattcagcaagctgctttttcgcgtgctggtgagcgtccttgtattcagcagctttttcttcaaaatacttcatttctgagagcgcctttttagcaagttcttcttcacccgcatcaaaagcgagctgagcctggtttcttcgcttgacagcaagcttttcggcttcttccacttttcctttaaaactatgttcaattgtctgctgcttgacgatggtatgcttcgccttggcgatatcgctttccatgtcgcgtacgtattgattcagcatcacccgtgggttctccagtttatccaatccttcatttactgatgcgacaaacatgtctctgattctttttaaagccatgatctcgtcctcctaaaatattatttattctttttcaaaaagtcttcccactctgcatcaaagcctgtgtcatatgaagctgcggaaggctccgttttctctgaataaaggatgtcatcctgtttgtcatcttgcttcatcattttccatccgaaataaaccatcgctgcagcaaccgcgatgccgatcagaaacggcaatgaccctcccaaaaacatgatgccgaagatcgcggccagtaccgcggcaaactggcgtccttccttccattttttcacggaatagaatagaagcaatgctccaatagcacctgtaaccaatccgccgaaatggcctccgccgaagaacagggagacgccaaaaaggattagaaaaaagccgatgatggacttcccatttatattcatatttgctcctcctttctcgttcatgtctttactatagtcaatttcaggcttcgacaaaacgagtcacagattgattttgccgtacgaccagggtcgtatggcacatcggacccgctcgcataaaaagaccgctcatctcagcgagagagcggtctttctgcaggttgccttgctatgattcaactttaggattccagccgtccaatacgttttcaattgtccatttctcagcctcatgatcggcaagctgccttcgggcctcatgcgaaatcgcacccggacccgtattcccgtattcgtacaatctggcatcggccgcagaaaagcccgacatatccgtccatccttcaggcttgatgtgtgcgcctaaatcgcagcggtgatatagcacactggcgatggcgtcggggtctcctcccggatgccatgggcgcccgaggtataccgttccatctgcggcatcgcttgtcactctgcagtttgttatcaataaaccgaacggctttgcgatatgcgtgctcgcagctgtcacataaccgttgtttgtagcggacccgcggtcagcgctatggatctggcactcttcaaacacagctcttgctcctccgaaaatgaaatcgacatcgccttctatatagcattgataaaaatattgtgtaccgtcattgacaaacagtgtatcttgtctgcctataaacctgacatatttgaacgtcatcctgtttcctttcgcataaaccgccaccgcttgcgtatcggtcgtgtcgactttcgtgcggtcgaacgagttttcaaacgtcaaattttcggcttcaacatgatccgcataaataaacacgcttgaacttccggtcgtgccgtatttccctcctccttccttttcttttccggcatagttgtcatacgtaatcacagtctcgtaacgattttcgccgatcagcttcacaaacggctttgtagccggaatatgaacgacttctttgtaaactccttttttaatgaatatcactttctgttcccgactgtactcaggcaaagcatcgatcgcctcttgaacggtttgaaattcgccgtctccatccttcgaaaccgtcagccgtatagcagctgcctcccgattaaccacttgaacactccctctctttgaaaacgcttacttaaagtttacgacaaaaagccgttttcccctgccggaaaacggcttgatttgatcaatcggcccgtttctgttagataacgattggcggatggctcattcatgattttttctttgtccggaatacatcagcgcttcgttcatattcgacatccacttccccgagacggtgattgacaatgcgcgccgccgcaaataaataatcggacagccggttgacgtatggcagcgcaagcggcggaatgtcttcttctttggccaaagcgacaatctttcgttcagctcttctgatgaccgttctcgccgcatgcaaaaatgatgccgcttctgttccgcccggaagaataaacttggtcagctgcggcgcttcctcgacataggcatcaattcgttcttcaagcatggtgattgattcagccttgagcttgccttcttcctgaacattgacatgcgccaaatcactgccgcagtcgaacagctcatgctggatggcggtcaactctgacaaaatatcatgaaagagcgcctcttctgcttttaaataagactgagccagcccgatgaaactgtttgcttcatccagtgtgccgtacgcttccactctaagatgatctttatcggcccttccgccaattaaactcgtttttccccgatcgcctgtttttgtatagagtttcatttcatactcctctctttaccacttgtctctatagtataccctgtttataacggctgcatagatcgtttcattatgaaacacaaatttccggaacaatcattgaaacaaagtatcgttgaataaagaaacactcgcttttataatagaattgtaaacggttttattcaaagacaggtgggatgaggatggaatttaatcagcaaacggccattatcacaggtgcaagccgcggcatcggcagagccattgcggagttgcttgcggataaaggggcaaatgtcgttatcaatgggacaaacgaagaattgctcaagtccctgtgtacacaattgaatactgagagaaagtgcgcttcttatgttgccggtgatgcaagtttgccagaaacagcctcgcttctcatcgctgaggcaaaacagcggtttgggcggatcgatattttggtcaacaatgccggcgttaatttgcgcaaaacgaccgttgatacgtcgcttgaagaatggaaaagagtgatagatttgaatttaaccggcacctttctcatgtgtcaggctgtcatcccggaaatgatcacgcagggcggcggaaaaatcgtgaacatgagctctacgacgagcaaaacaccgcatcacaatgcctctcctgcttacggtgcatcgaaagcaggcatcaactatttaacgatgcatttggcaaaggagcttgctgaacaccgcattcatgtcaacggcgtctgcccgggaccgattgaaacggatatgagcaagcagtggagcgaggagtaccgcgcagcagtcgtcgaacggattccgctgaaaatgctcggctcaccagagcatgtcgcaaacgttgtcgcctttcttgcctctgacaaatctgactttatgacaggcgaaaccattaatattaacggcggcacctatatgaactaaaaagaagagcctccttaatcggaaggctcttctttttttatgcatgccgctcacgcgtaccggacagcatgatcgcctgtctcaccgcttcttctatactcgcaggatcggctttgccggttcccgcaatatcaaaggctgttccgtggtcaacactcgtacggataatcggcaggccgactgcaatgttcacaccggcttcaaggccaagcaccttaatcgggccgtgtccttggtcatgatacatagccaccactatatcaaagtcgcctctcactgctctgaagaaaagcgtgtcagcgggcagcggaccgaatgcctgtataccttcactttgtgcgcgttcaacggcaaggacaattttctcttcctcttctccatgtccatctcaccggcgtgagggttcatgcacacggcgattttaggctgcggaatgccttcgcgaatgagcgtgtcatgcgccaattgaattgtcgttacacccgtttcgcattacgagagagtccgttcaaacgattgggacagcccctccaacttaaatcataaatgatgcaatatagggataccattcatttcatcaagtgccgcgcgcgctcgttcaaacggctttattcttgaccggcagcggcccacgtttccggaacacgtacatagtcaatcactgccaaaataaacgttatgatcgaaccgcttaagacatccacccaaactccccctttgtttgtgagcctcttacaggctcatggtgaaaaacatgtacagatccgggcagcctacatatccagcaatttcaaatagacagcttcaatctccgcaacagacatcggctttggattgttatccatgagccttttgacgtcggcagccgcctcagcaagcgatggcacatcctcttttgataccccgaatgtctttaaattttgcggaatatttaaatcggcggtccactattcaatttttcgtataacccgctctgcttggctggacttcgaaccttttggctcgattccaattacgccggccacgtccgaaaggcggtcagttacatgatccgcgttgaaggccgttacatgcggaagcagcattgaattggccacaccgtgcgaaatcttgtattttccccctagagggtaagccatcgcatgaaccgccgctgttcctgcgcttgtcaaggccattccgccatacatggcgccaatgagcattttttctctcgcctccaggttatctccatgatggtaggcctgctgaatgctggaggaaatcagtctcatagattcaagcgcaaacatgtcgctgaatggatttgctttgttggaaatataggattcgagtgcgtgtgtaaatgcatccattccggttgcagctgtgattgcctttggaagtccggtcgtcaaaactggatctaaaatcacaagcgacggcagcagatagggactgactataccaatctttaattctttctcagggaacgttacaatcgcattcggcgtcacttctgaccctgttccggatgttgtcggaatcagcacaagcggaacgccgggcttttcaacgagattcgtgccaatcaaagcagaaatcggtttttcatttgttttcagaacagagaggattttagccgcatcaagcacactgcctccgccaattcccaaaatcgcgtcatggcctccttcagaaaaaagctgaaaaacctgttcgatattttgctccgtcggctcaggctgtatatccgtgttgacttcacttgagatgcctttctttgcaagcccttctttaatttggtctgcatagccgagagagacgatcgacggctgagttaaaataaacaccgaacgaatctgattcaatccaatttgatctaagtaatcgccgagcaaattgagtgaatgtggaccagcctcaattcgggcggccgttcgaaaatgataaagcgttttcataatcttactgctcctttgccagttttgcttcaattccgtagccttccagcatctttttcacttttagcagcggctctcccgacagttctgcaatcggacgtttaggcggtccgacgtcgatgccggcaagctccgctgctttttttagcggcgccggcagtgaaccgagtgaaaacgtatcacggagcggctgcagctgctgttgatagtgctcgctctcttcaatgtttccttgtttaaaagattcatagattgaaacaacggtgtgcggaaacacattggctgtggcagccacagctcctgtccctcccgccttcaatgtgtctaagatcagcgaatcagttcctgccagaacggaaaaggactgttcttttgtacgctcaagatacgccttaatattggcgaagctgccgctgctgtccttaatgccgatgatgttcgtcaatgccgccagcctttcaactgtttcgggctccaatgatacgcctgttctcgacggaatgttgtagagcaggacaggaagcgcgacattttcggaaatcgtgcggaaatgctgatacaattcctcctgcgaaggtgcaacaaagtatggcgtaataatcgaaagaacatccgctccaagatccgccatttgattggataaagaaatggtcgcctcagtactgttttcacctgctccgatgaaaacaggcactcgtttattaaccgcttttacaactgtttcggcaatttgaagcttttcctcttgcgagaataaatgaaattcgccatttgtccctaaagcaaaaatgccatggacgcctgaatcaattagacgattcaccagcttttcggctgcgcccggatgaaaggcctgttcttttgtaagcggtgtcagtatggcagggataattccctctactttcaagtgacttcgctcccttctgttgcatttttaaacaatcaaatagtaaaacgctttctcaaatttcattataaaggtgttttgattaattaagcaacattttttaggttcggaacaaaagagtaaaatctcaccttcagctgatgcgttttaaaacaagaaaaaaacctgtcaaaagacaggtcaatttaatcttttaaagctttcacacaagcggctgttttattttgaatttgtgtcaaaaaagcggtttgatccgctgaccggccggattgagtggccgctacaaggacatcactacacggaacatgatgctgggctgcggcaaatgccgcagcgcttatcgccttcacaaattgaccatcctgcaaacagccgtcaactaacacccacatgatcaaacgccccatcgtgtctttcataccgacgatgcaaagatcaccgctttccgacacaatatggcagtcagccaattcagcatcatgttggataaacagcgtttcctgttcaaaagctgacgagccatgcggccatccagagttatttccgctgtcgaaaataagttttcgtctccaagcaaagcccctttctgaggacagaagccgcagcgggcggtctgccaaaaatgcgatgccgtgcggcaaatattgttcaattcgctcttttaaaaagaggggctcggttttccgcgggatgtttttcgccataattgtaaactgcggatttgaacgctggggatggtccagtccagtgatgtccgtatcatacactcgtccgatgcgcccagcagaaagagctgcttccgggcggtcaagaacttctgcttttccatcttttaatagcagcagacggtcacagtataaactcgcaatattcacatcatgaaacaccccgaccactgcgagtttggatgcagccgtttcttgtttcattaaatcaagcagactcttttgaaatgacaaatcgagaaaactcgtcggttcatcaagcagcaaatattcgggttcctgggcaagtgcctgcgctaaatacacccgctgctgctctccgccgctcagctcatggatggatttttgggcgaagcgaagcgtgtctgtctgcttcatcaccctcttcacgatatcatggtcttccgccgtcagctgccgaaaaaggcctgcttgatacgcgtagcggccaaactgtaccgtttcctccaccgtaaaggaaaaggcctgctccgttttttgaggaaggaccgccattttgcgagcgagctccttcgttttgtactccccgactgaacggcattcaagcagcacctcgccgcttcggggggcaattgttcccgacaacattttcagcaaagtggtttttccgctgccgttcggaccaagaattcctaaaaattcacccggctttacagcaaaactgatatcctgtaagacatccgtttttccatatccgccggacacccggatgacatcaatcatgaactcgccctccccggtagcgccgaattaatataaagccgaaaacaggtgcccctatcaatgcggtaataatgccgatcggcagctcggacggctcgataatggttctcgacaaaagatctgacagcacgaggaacgaagcgccgttcagcatcgagagcggcagaagatgacggtgatccgtaatcgacagaagccggataaaatgcggaatgacgaggccgacaaaaccaatggttccagacacagcaaccgcactgccggttaaaatagctcccgccaacagaacgatatatttactccgcttcacattcacgccgagcagcctcgctttttcctcgccataagtcatcacattcagttccctcccgctgatcaaaagcgcggcagcgcccgcagcaaaaaagggcagaaacaacgcgacatagccccagcccctcatcgatacgctcccgagcagccagtgtacgatcggttttaaatcatcgccggtcaaagcgatcatgagagaaataagcgcacccaaaaacgaactgaagatgatccctgttaaaatcaaagcggacagggtcaacaaagggtgtacgagccgcgcaaaaaacaaaaccaaaaaaatcacgataacagccgcagcaacgcttaaaaacggcagtgtaaaacttccgatcaccggcagctgaatcccaaaaaacagcgtgaccacggcaccgacggccgcgccagacgaaatgccaagcgtatatggatccgcgagcgggtttttcaagagcccctgaaacccggctcccgcggcagccagacccgcgccgacaagagcggccaaaaccaccctcgggagcctgattttcatgatgatgttcgcctctgtcggatcgggatttaacccttgaatgccaaaccattcttccaaaaaaaccttcataatagaaggaatgggaatctccaaagatccgatagagattcccataagaacggatgccgacaaaaacagcaggctgaaggcatatgccgcaaaacggttatttcttaaaaacgtcagggtaaatatgttcagcaagctcttcgacccctttgatcaatcgcggccccggacgggtcacgaggtcagggtccacgtcgtatacttcattatttttgacggctttgacaccgctccagccgctccgttttttaatttcgctgacagcggattcgccgtttgtcgtcacgatcgcatcgggattcagcttgacgatcgcttcttccgttatcttggcccagcctttctgcgcggaagcagcattttccgcatggatcgcttcaagcatttcattcataaaggtgccttttccggtcgtataaatgtccggagccggagacacttcgacaaatactttcttttgatctgctttagatatggctgccgctttttcttttatgccagccaggtcagatttcatgctcttgaccaggctcgctgcttgatcctctgcgcctgcagcctttccgatcatttcgatcgaccggtacgtctcttcaaaagaggccgcatcatttacagtcaccaccgtaattcctgcatctttcagctgcttcagcccttcttcggcactctgcatgctggaagcgtgggccaggaccaagtcggggtttaacgaaatgattttttccgtattaaattccatgcccccgattttttcaacgtttttcacttcttttggatatgtatcaaaatccgtcacgccgacgacttttttccccaggccgagggcgtatgtaatttcggtattgctcggcatcagagagacgattttcttcggttctttttcaattttgacctcttgtcctgaggcatcttttatggtgaccggaaacgcttcagccgccttctcctgtttttgctcgtctgccggtttttgcgcttggccgcagccgctaaggacgccggcagccaacagcagcgacagcaataaaagcccaaacttcttcatcctgcttcctcctcgggataaaataaaaacatctctactcagtaaagatgcagcaaaccaagaacgtacaaataagtgcacatcacttatacgcatctgtcctcgcagattacgcggtcatcatccaggcggttattccggctattggttcatcgctcccggcctgtccgaactactaagcggagctctcgccggcttcccctcttaagctgccgatcagcagcgcctttctgactcattcgtatcctaatttcggaattattatactataatcgacacaggtctgtatatgagattctgaaaaggagattttcagctgaaaaacgttgtttttgctaaaacaattacgatatattgcatatagagaaagggtgattttatgccgataccgaaaaactatacgcctcaggtcagactttcagcaaaggaaaaagcgtttcaccaattgcagcgctggattgtagacggaacccttgaacccggcgaaaaagtcacggatgtcgatctggccgaagcgctcggcgtcagccgcacaccggtcagagaagcgcttcagctccttgaatcccaagggtttgtggaaatgaagccgggaaaagaaacaaagatcacgctcattcatcccgatgatgcgctggccgtctatcctccgctcgcacatctccaggctttggcggcagaactggctgcgccgcttttaacggaagaagagatcgccgagctcaaaaaactcgctgctcaatacgaaaccgcgtttaaagaggaaaggaaccacgatgcagctgaactggacgaacagttccaccatttgattacagaagcggctaaaaacccgtatgttcttcagttttctgccgttctgcagcttcatgtcagacggatgaagtatgtgtttttcaatcggcctgctgctccgaaaatgcagtccgccgccgagcattgggaaatcatcgccgcttttgaaaaaaacgatccgaaattggcggctgaagtgatgaaaaggaattggctccgtccgatggaagatattcataaagttttaaaaggcagggaacaataaagcgccaagcacgattttcgaccgcggtatccagctgcgatatactgtttattagatgttttctttcatcttaactctgtaacaaggattgatggcatatggatttaaagctgaaaaacaaactcgtgctcgtaacgggttctactgctggtattggaaaagcaacggcggaagcctttttggcggaaggcgccgaggtcatcgtaaacggacggacagaagaaaaggtccagtcggtcgttgatgagctttcccggcacggaaatgttcacggaattgccactgatttatccgatcctgaagaaagcagggcactggtcgaaaaaaccgctgaaatcggggagcttgatgtcctcgtcaataatatgggcttctttgaagtgaaggattttacagacgtgacagacgaagagtggctcaaatattttgaagtaaatgttttaagcgccgttaggctttgccgcgcgtttttgccggccatgctgaagcggaataagggaagggttctcaatttggcaagcgaggccggcattaaaccgcttccgcagatgatcccttattccatgacaaaaaccgctttgatcagtttgtcaagaggtttggccgaaatgacaaaagggacaaatgtgaccgtcaactctgttcttccgggacctacctggacggaaggcgtcgccaattatatggaaggtgccgccgctcaggagaaaaccgatttagacacctttgtcaaagattatttcaaagtgaatgagccgacttctttgattcagcgctatgcaaaaccggaagaagtggcgagtacgatcgtctacctcgcttccgaaaaagctgcggctatcaacggttcagctcaaagagtggagggcggaatcatccgctcgatttaaccgaaatcctctgccggtcggcagaggattttttccttttggttaagaaccctgcttcagacctcccgtcagcctttcgcggtcatccggctcaaagccgttcagccgttttaaacatgatgcacgccaatttgccgacagttcctccacctcgagaagttttttgatgccctcaatatcgttcttttcatgatgcttgatgcgatttgcgtatgaaatcgtaatgcctttagggtggcgtgagattcgtttcagaccatgctccttacagacgaacccttctttcagcacgcgaaagtaaaaacccgtaaatccggtatcttgtaccttcagtatcatgtccggcataccgtaccttacggttagtttatagcagggctgcctcggctggctcacctgtacaacagctgcacccagctgaaagatgtcgccgatatgaacgtcatcctccagcagacccttgatcgttaaattttcgccaaatgctccgtattccagctttctttgcagttccttttcccaaaagagataatgttcatacggatagacgcacactgctttttccgcgccgccgtgatgaatgagatccccctgtccgtcccccgtgaaattagtagatgacaggaagatggggccgcttgccggcttcttgtatattccggtagacacagctttattttgaaactgaatttcctctggcttccctacattgatcgaaaggatatcggcatattccattcatatcacctcttacattcaaatgtcctgcaaaccccttttgagatttaagtataatcgacctcttaccataaaactattcaatcgttattataaaaacaataggttaaacctatcattggaattcggctgtttttcagatggagaggaggaaagagcattggagctaaagcaattggaatactttatggcattgtgccgggagcttcattttacccgcgccgccgaaaaactgaatatcgctcagccctcgctgagccagcaaatccgtttgcttgaacacgaaatcggaatgcctttgtttaaccgttcaggcaaacgcaccgtgatgacggaagcgggaaatattctgctccagcactgttacaatatctttcatgaactgtcacaggcgcgagacgcgatcagcgagcttcaaggtttaaaacggggaacgcttaaaatcggggcgcttttgaccgtggttaattatttgcttccccggaccgtggtcgaatttcaccgcagctaccccaatattgaattgtctgttttagggctgagaaccggggatatttacgaccggctgctgcaaaatgagctcgacttgggcattgtagcccagcgggtggaacatcgtgacttagaagccgtcccattccttacccagcatctcgccctcgcggcgcctgttgacaatccggttgcaaagcggcagtttgtcacgcttgacgtgttaagggagattccatccattttgctgcctgagacgtattttttgcggcagctgatcaacgaaaagtgccgcacgcttggattcgagccccggccggtcatggaaatgacaacgatggaatcgatcatgaacatggtcggtaaaggcatcggcgccaccattttgccgaaaggctatcttaatgctattggaaataaatccattcagacgattccgatacaaaagccggatttgacgacggagatcagcatcgtttaccgtaaaaacaagcatatgtgcgctgcaagccgggtgtttatgaaactgctgatttcctcggtcaaaagcgaaaccgctgatgcgccgccgcgttaaaagaaaaatcctctgcatgtctgcagaggatttatgtttaggctttgtgtgagtcatagcgttttccgttaatatacagattcgaaaaaacggggtctttcacatgtttcagttccatcggaacatcgacgccgtcgatctcggaatcagccactttcagcccggtgaccggagagtggtcgtatgccagcaccctgatcccgtattgtccgcccatgcttttcagctgcttaacatcaaccgtgcggacgacaggtttgaaatctccggcatctccttcttcatattccatatcgatggcgatcacttcgcgcttcaagcttttgaccgtatttttgtgaaagtagatgttttcaagaacgccgccacgcaccgaattcgttttaatgcggagggctctgtccaagttcgggctgtccataagattgccctctgcgatgacgttcttcacgccgccggaaatttcgcttccgatcgtgacccctccatgcccgtctttcatttcgttatgttcaatgacgatgttttccgacggaatgttgatccttcggccgtccgcatttcttcccgatttgacggcgatgcagtcgtctccattatcaaaatggcagcccttgatcaccacgtttttacacgattccgggttgactccgtcggtattggggccgtgtccgatgactttgatgccgtccactgtcacattctcgcaaagcacgggatgaacttgccacatcggcgaattcagcacagtgacgccttgaatcaatatatgtttgcagcgatacggctgaatgaaattcggccgcaaataatgcccttttccaaactgccgctcagtgaccgggataccgcgctcagccatttcaaacaaagcgttccgatctttttcctgtgaaggctggccgttcgttcctcttttccacggccaccaatgctcgtcatctccttgaccgtcaagcgtgccctttccggttatcgcaatattatcggcttcgtaagcgtagatgagcggtgaataattatagagctcgactccttcaaacctcgtcagcacaacagggagataatcttcagggttctgactgaatttgatcaccgctccctttgcaatatgaagatccacattgcttttcaatctgagcgcaccggaaagaaacacgccttcaggaaccgttactcttccgccgccggcttggtgggcttgatcaatcgccttctgtatcgcttcggtcgaatcgttttttccgttttcgtcagccccaaacgatgtgacatcaaatgagcgattcggaaataccggaaccttcagcttctttacaatctcttcttttattttctgcagactcacgttaccgccccctttataatgtgacgcctgttttaaatatcgcaagctccctgaaatcgtttatctcattgttcagctgcctgccgcttgcgacttcgatcaaatacgctgtcagctccttcaaaacgtcatcttctgatcggtcttcgagcacctttcccgcattaaaatcgatccaatggcgctttgcctcataaatcgccgtatttgtcgaaattttcatcgtcggcacaaaggtgccaaaaggagttccccgtcctgtcgtaaataaaacgatttgacaccctgcagcggccagtgcggatgaagcaacaaggtcatttcccggagcactcagcaggttcagccctttctttttcaaaacgtccccgtattcaaggacatccgccacctttgaagtgccggctttttgcgtacagccgagcgatttatcttccaatgtcgtaatgccgcccgctttgtttcccggagacgggttttcatagacgggctgcctgtgatcgataaagtactgtttaaaatcgttgattaagcggacaattttatgaaacacttcctcattttcagcccgctccatcaatagcgtttctgccccaaacatttcaggcacttctgtcaacaccgccgttcccccttgggcgatcagaaaatcggagagccggccgagcagcgggttcgcggtaatgccggaaaatccatcagatccgccgcacttcaaaccgattttcagttcagaaagcggaacatcttcgcggtggtcaccttttgcatgcttataaatttcctttaacagtttgacgccttccgtgacttcgtttgatacctcttgggaaagcagaaacttgacccggctgtgatcgtaatcgccgagcgcttcgcggaattcgtgaatgctgttgttttcacagccgagccccagcacaaggacaccgcctgcattcgggtggttgacggcattcgccaaaatcgttctcgtgttgatatgatcgtcgccaagctgtgaacagccgtactgatgctttaatacgtgaacgctttcaaaaggggcgatggagccgacctcagccttaaattctttgatgatcagctctgcaatgccatttacacagccgacagtcgggacgatccatagctcgtttctgatcccggtttttccgtcttttcgtttaaagcctttaaatgtaagcggttctttttgatagcggttttccgtaaacttcggcttgtagctgtattcttcgacaccgcccaaattcgttttcacatttttcgtgtgcacccactctcccgtctgaatcatttcagtggcgtgcccgatcggaaagccgtatttgatgacgttttcattttcagcgatgtcttttaaagcaaacttatggcctttcaaaatcggttccttgatcacgatggttcgttctccgacagtgaccgtttcaccggtctgcaattctcttaacgcaatgccgacattatcttgaggattgatcatcaagcagtctttcattacatgtcccccagctcagccatttggcttttcatcattttttccagcgccttcctcattcccgtttgtttcatgtcccttaaatattcagccgtcttgtccgtcaatccgggcatgtcgttcagattttgcccccacactttttcaaacccaagaacatggaatgcgatgttcgaaacgtctgtctcttccgtccagagccgtttgaggaaagccagcacctcatcgtcgtcagacagcggaatggccccatcatccccatcccgttggcctcggtaaaaataaattaaggcgcttaaagcaaatacggttcgagccggaagtttgcctgttcgttccgcatattccattaagacgggcaaatttctgactttgaattttgcaaaggaatttaaggaaatatcgatcagcttgtgacggataaacgggtttttaaagcggtcgagaatctcttccacgtagttgtcaagctcgctatcgggcatatcgatcgtctcgagcacctcccgctggatcagctctttcacaaatgagccgataagctcgtcttcagccgcttcgcgaaccgtctcaaggcctgccaaataagcgaccggcgtcatcgcggtatgggcgccgtttaaaattctcacttttcttatcctgtacggcgtcacatcctggacaaactcgacattcagaccggcctcatgaagcggaagctcgtctcgaagccatttcggcccttcaatcacgaacaaatgatacggctccgccttcaccatcaaggaatcgtgatagccggccgcctcttcaagccggtgtgcattttctttcgggaatcccggtacgatcctgtccacaagcgtattgcagaacacgtttgcctcttcaagccaatcgatgaacccttgttcaagcgcccacgcgtttgtatagcgcagcacaatgtctttcagtattttcccgttatcctcaagcagctcacacgggaggatcaccagacctttttccctgcttccctgaaaagtcatgtatcgtctgtataaaagtgcagtcagcttccctggatagcttttctgcggacggtcggacagacggtcttcctcgatataaatgatgccggcctctgtcgtatttgaaaatacaaaccgcaaatccggcagatcggccagctccataaattcatcataatgctcatagctgctgacgactctgctgattgatgtaatgacagcagaatcgcgaacctcccgtccttcccggaaaccttcaagataaagcgtgtaaagcccatcctgttcttgaaaggccgttactgaaccgcggcgcggaggcacgacgacggcactgccgttaaaatcggtttcttcattcaatctatgaatctgccagtcaataaaccccctcataaagttaccttccccgatttgcaaaatccgttcggggcggctcggcttagaccttatccgtttggacagcctctccatttcaatcccctcctcatttctgcacacgttcacattttacagcgcatcaaaaaaatgatgctatagatgcttaactgaattgcgaatgatcagctccgtgctgatgagcgtctgcccgccttctgcctgcgggttttcgatcaatgacagcaggctttccgcaccaagcatgctgattttttcagtcggtttttttaccgtcgtcaatgacggtgtcgtatacgccgaaaatccgctatcgtcaaagccgataatcgacatattgtcaggacagcgtttcccgtttgcatagagggcgttcatcgcgccgatcgccatatcatcattggcgcaaaacagggctgtcggaggattcttcagctttagcagcgtttcagccgcgcgaaagccgctttgcatcgtataatcgccttgaacgaggtattcgccgggcatatcaaggtttgagtcgcgaagcgcgcgaagaaagcctcctttcctttcttgagacgatttaaagccttctttcccctgcaccatggcgatctgtttgtggccgtttttgatcaagtatgaagcagcgaggaaagcgccctcgtgttcattcgccagtatattgacaacggagtgcccttcgatttttctgttcagcacgacgaccggaatattctgtttgaggacatgctcaataaaagcctgatcctgttcgctttggctgattaaaatcatgccgtcatagcggttgcggtgaatggatgacaaatcatgataatcgtcgattcccctgacaaccatattatagttttcatcgatcaccttgttgacgccgcgcaggatgtctgcaaagaaacttgaagacgtcccgtctgtcaggcttgttaaaaacaggccgatcgtaaaagacttttgcgtgacaaggcttttcgcattaaaattcggtttataattcatttcggctgcgatgtcgagtattttctttttcgtgttctcttttatcagcggactgttgttcagcgctctggatactgtggtgtgcgatacattcgccagcctggcgatatctttaatcgttactgacattgttttttacccgccttttcttgctgttgttaccatcagtttaccatatcaaaagcgctttttagaaagtgaatttccgctatgttctcgctttgatttccgcgaccatttcggcgtgcttctgatccgtcaaacggtacaggtagccgagaacgagaatggccgccgtcagcgctgctgccggatacaaaaggagaatcgctttaatgccgagcagcgtccccgctttttgggccgcattcggcacatagccgatgatgctgagaccgatccctgacaggaagccggagagcgactgagccagctttctcgaaaaattaaacagcgagtataccgttccttctttccgttcccctgttctccactcgccgtaatcgatcgcatctgatacgaatgcccaggtgattccgttcggaatgctgatgccgatgaaggcgatgcttgcgagaatcgtaaaaacaaagacattgcccggtgcgaaaaaattgatcagatcggcacagacagaaaccgcgagccccaaaatggcggtatgctttttcccaaaaagcttcacgagcttcggcagcatgatgacgccgataaaggatgagccgatgatgatgaaattcatgtaggccatcagttcggcgttcccgaggttatactgcgcgaaataaatcagcatcgcggatttaaggttataggctgaaatcgtaaaaattgtcatgaatattagcgtaaggagcggcttgttcgtaaaaaacgtctttgaaatcgctttgaatgtcactttttcctgtttgtacttctcatcttttacgacgatccgttcctgacagttcctgtagcaaatgtagaaaaacaacacacccagaaaagacatcagccccatgacgaccggataggcaaccgcagggttgtcaaacctgacaatcatcgggatgacaacaatgctcgtcacaaacagggcgcccagcgagccggcttggcgaaaggaagcaagcgaagtccgttccaccgagttttgcgtcatggcagccccgagcgagccgtaagggatgttgacaaaggaatagccgagaccccaaagcatgtatgaggcataagcgtagatgagtttgcccgtcggtgacagattcggcgagatgaaggtcaatatcgtcaaaatcgcaagcacaaagcttccgtatagcagatacggcctgaatttgcctttcgggccgatattcttcctgtagtcgatcgatgttcccacaatcggatcgacaaaagcggcgaaaagtttgctcacaagaaaaatgcctccggctgccgccgccggaatgccggcaacatccgtaaaaaacttcagaagatagagctgtccaaggtcaaacataaatccgttcccaaaatctccaaaaccgtaagaaaccttttcttttaaacttaatttctcttgagtgacggcgactgtttcggtttgtttgttcgtcgatatttccatgaaaaagcagctcctctgctagccaatttgtgaatctaagctttcaaacgatctttcacttcaaactggaaatagtgttttgcattttcgtagcagatcccttttacgatccggcccagcagttcgatatcatccggcgcttcgccgttctcaacccatgtgccgataacatcgcagagcaggcgcctgaaatattcgtgtcttgtgtaggaaagaaagctgcgcgaatcagtcagcataccgataaaacggctcaatagaccgatgttggcaagcgatttcatttgttcgagcatgccgtctttcgtatcgttgaaccaccaggcggtaccgtgctggattttccccggtatccggccgtcctggaagcttccgcaaaggcttgaaatcacgacattgtcccgcgggtttaaagaatacaagatcgtttttggcagcgcatcttttcgatcaagagaatcgagaaagctgcacaaaggctttgcgatatcctgatcattaatcgcatcatatcccgtatcaggcccgagcttccggtacattttgctgctgttgttgcggagggcgttaatgtggagctgcatcgcccagcccttctccgcatagcatgttcccaaaaagtgcaaggtcaaggatttgaatttgcactcttcctcaggcgaggcgctttccccgttcatcacctttgcaaaaatcgggcgcacttcgctctcatctgtttccgtgtacatcatttgattgatggcatgatccgatatccgtccgcctgcttcatggaaaaagtcaattctgtttttaagcgctttcaaaaaatcgtcataattcgctatcttcataccgctagctgtttcaagctttctcacccaggcggcaaaaccctcttgattgatttccatcgccttgtctggcctaaatccaggtaaaacgcttacattaaagtcttcatctttcagctttacatgatattcaagactgtctgtggggtcatctgtcgtgacaaccgtttcaacgtttgatttttcaatcaagtctctggcgccgaaccctcctccggccagctgttcgttaacccgctcccaaatatgcggcgcgctcttttcatcaagccggtcatcgatgccgaaaaacctcctcagctccaaatgggtccaatgatagagcgggtttccaatcgtcatcggaaccgttcttgcccaggcgctgaatttctcctcgtctgacgcatctcctgtaataaactcttcggatattccattggccctcattgctctccacttgtagtgatcaccgtagagccatacttcggtcaggtttttaaacgttttgttttcgtaaatctccttcgggctcaagtggcagtggtagtcgatgatcggcattccttttgcatactgatggtacaacactttcgacgtttcattcgttaaaagaaaatcgtcattcaaaaacggcttcacagaatctccacctttctttatttataaatgttaacgttaacaaaaccatctgcagcataatgtgaacgttaacatttaatcttattttatactaaccgcgccttcttttccattattttctcaacataaaagaagcctaaaggcaataacctttggcttcttctttttcataccgcttatttggcggctttagggtttttcttaaattccatcgtaatttccgtccctcggcctgtccggctgtcaactgcgatgcagccgtcgtgcaggtggacaagttccaaagaaatagcaaggccgagaccgcttccttctgtcgcatcttttgtatgcgttcccctgtagtagcggttgaataaatttgagacggtttcagagtccatgcctcttccgttgtcttgaattttaagaataatatattgcttggattcttcaaggatcaccttgatgtcagtgccttttttgttatgcttgacggcgttggcgaggaggttttccaagactcttcggaaccagcccctgtctatcgcaaactcggtatctacttgcttgtattcaaaagacacgttgtacccttctgaaaatgaatggcgcttaaactcctcaacgaagctctttaaaaacggcacgagcctcactgtctggcgtttaatcggcaaagcgtcgtttttcagcctgtacgtcaagttcaagtcttcgattagctgtgacatgtagtccgacttttctttcatcgcctggccgatttcgcggatttcctcttttgaccactcatagtttggagactccagcatcatgctgtagccgtaaatcgtgctgagcggcgtttttaagtcatgggagagccctgcgatccattcctcccgggtcgtttggattttcttgcggttttgctcgtcttttttcagcgtttccgtcagctgctccatcgattcaaacacttctgtgaacagccggtacggctgttttcgcttcccttttttgttccggcttcgcgggcggcctttccggtttctcggttcttcaaatcgcccttttgaaaggttgacgatccatttaatcgtatggatgatcggcatgccgaatctgaaagaataccaaatggtcatagaagacatcaataagatcagaacgccgatcacgatgagaacgatttttaaagcgagcccgatcatcgtcctgttgaactcatgatccggattaaaaatcgggttcggcgtagcggcgatcagccattctgtcgcgcttaatcgcctgtatgaaaactcgtgctcgtagttccatggctttgatccgtattttaaaagctccagctcattgattccctggctgtaatctatgtcctggtagatcgagtccagcattttccctttttcgctgaacaaatagacggaccctttgtttttcttaatgaaatcaagcgtgctttttttataggaagaaaggtctgccatatccttctcttctttttccaaataggacaggatcgtatcgcttttcgactcccatccgaataaaatcacgtagtcttcaccattgaaattggcagaccagaagttgacttgatattttttaattctttttttatcaaaaacggataccaggtcttccctgtggtactgcctctgaatttccgcaggaagacggtaggaataaacggttttctccttgccgtctaatatttgaagccagcctccctgtttgtcgatagccgatttcaagatatcttcgatctgccaattgttattgtcatccacgctgacccagctttcaaacgtgtctgaagtggcttttgccaagcctgtatccgcttcgctctcgcttaatcggagagcgaaaaaaatgaaggataacagcaaggtcgcgagaacaagaccgagaatcaaaaaaatctgactgacaaagtggagaacgagctttcctctgagcttcatccttcgctctcttttcgtgcaggattgggaacgaacttatatccaaggccgcgaatcgtgacaatatattcggggctgctcgggtctttttcgattttctccctcagctttctgatatgtaccatgacggtgttgctgtctccataagatggaacgccccacactttttcataaatttgatccttggaaagcaccctgttcggatgatcgcaaaaatattgcaggagctggagcagctgcgccgagcagctgaccgtttcgccgtccacgatcagctccgcaaagtcgggatgaaatataaagcgttcatattcgtaggctgaagatactgaagcagctgcaacttctttatgtatatacgttctttttaaatgggctttaatcctggcgattaattccagaggattaaaaggttttgtaatataatcatcagccccgtaggcaaaacccgacagtttatcgagatcggatgttttcgccgtcaagaagaagatcggagcgttggtgtgccgcctgatttcaggagatacatcaaatcctgtctgtcccggcatcatgacatcgagaagtattaagtgcacggtgtcctttttcacgatgtcgagcgcttcttctgcgctgcttgcggtcagaacttctgaaaatccttccttcgtgaggacgcgcttgaccatttgaacaatggcgtcttcgtcgtccacaatcaaaattgtcgcattttccaaaatccttctttcctttctgtctatatcatgtattttatatcctcatcttaccatctattatatctatatcggcacacattttctgattttaaagtaaaaataaacttttttagaaatgattttttactttacgaaatcatggaataaaaaaacagacatctgtccgatgtctgtccagattgttgacaaaatcccaaaaaggtcttttgttattgggattttgtcatccggttgccagcctctgatcctcttcttttttcaatagatcgtaagtcaggcacaccggttttcctgtgcgcgggtctaatataatttcagcatcaatctgaaacaccttttttaatacttctgatgtcatgacttcatgaggggcgccctctttgacaatcgcaccccggttcagcgccaccatatgatgagcgaagcgggcggcatggttgaggtcgtgaatgaccatcaaaatcgttcggccttcttcttgattgagcttttccagcagttgcagaatttcaagctggtgcgccaagtccaaataggttgtcggttcgtcaaggagcaagagctccgtttcttgggcaagggccatcgcaatccagacgcgctggcgctgtcctccagaaagggcttcgatcggccggtcataaaaaggcaacattcctgtcacttggagagaccattcaaccatgcggcggtcatcggccgaaagcctgcccattcccttttgatgaggaaaacggccgtaagaaacgagctcatatacggtcaaaccgcctggcgcctcaggcgtctgcggaagaatcgccatctgtttggctacatccttcgtcgacatttggtggatcgctttgccgtttaaataaacggcgcccgttcgcgaacgctgtatgcgcgccatcgtttttaatatggttgatttgccgcacccgttcggaccgatcatggtcgtcacttttccttttggtatgtggaggtttaagttttcgacaatcatctgttcgccgtagccgatccccaggttgtttgttgaaagagacacgttgcacccttcccttctttaatttgttttcataagcaaatagataaaatacggtgcgcctaaagcggcaatgacaagccctacgggaatttccgaaggcgccagtatcattcttccaattaagtccgccagcaaaaagagcaatgctccggtcaacgcggaagccgggattaaaagctgatgcttcggcccgacaagtcttctggcaatatgcggagccacgagaccgagaaacgtaatgtttcctccagccgctacacacgcgccgctcagcgcggctgccgacagaagcagtgtgcgccgctctttttcaactgccgttccgagccctgttgcgagctgatcaccgagattcagcacgtttaaatagcgcgctttatagaggataaaaggaatcagcacgacaatccagggcagcacggccgagacaaagctccagttcgaactccatatattccctgacagccaaacagccgcctgcataaagtcatttgggtccattttaagctgcagcattaagatggccgccgaaaacgccgcattcactccgatgccgaccaaaacgaggcgaatgggattcaagccttttttccacgccagcaaatagatggaaacgactgcaaagcaggctcccaaaaatgcgaatatcggcagggaaaaaacgaatcctttttgcaggttgccaacgtctccctgaaaatagaagatgaacagcacaacggcaaaacccgctcccgtattgatgcccaatatccccggatcggccaggtcattccgggatatcccctgccagacggctccggagacagcaacccctgcaccgatcagcatggcgaggatcatgcgcggcagacggaattcaaataatacaagttcatcctgcggcgttccaaagccgaacagtgttctcaatgtagcaagcgggtcgatgcggatttctcccatgttcatgcttaataaaaacacggcggccgtcagcacggccatgacgagcatcaccgcacccgcccgtctgttgtttttcttgagcattacagtccactcctttccctgcgggccagatagagaaagaatggtacgccgacaagcgcagttactgctccgacaggtgtttcaaacggcgggttgaccagccttgccgcaatatccgcatagatcagaagaacagcgccaagcacagctgagcatggaatgatccagcggtaatcaaccccgaccagaaagcgggtaatatgcggaatgatcaatccgataaaaccgatcgcaccggcaacggatacagtggcacccgtcagcagaacaacggacacgatgccgatcgcttttaccgtcttcgtatattgaccgagccctttcgccagctcctcacccaggcttagaaccgtgatggaacgggcgatgacaaaaacgaccgccaaaccgagcgctgccgccggaatcaacaactgaatgctgagccatttcgtgccggcgacacctccggcataccaaaaactgacgtcgcgcgccacatcaaagtggatcgcgatgctcgtagaaagagcgctcaggaacgtgccgacagccgtaccggccaaagccagctttacaggcgtaagaccgccttttgaaaacattccgattccaaaaacaagccccgctccaagagcggcaccggcaaatgaccagatcatcagcccgatcgatgaggttcctggaaaaaaagcaaacgcaacagcaattgcgaaagctgacccgtgcgtgacgctcataatttccggcgacgcaagaggatttcgcgtcatcccctgcatcacggctccggaaaccgccaggcaggcgcccacaagagccgcacttaccgtccttggcagtctgagttcctgaataatttgatgggccgtatttttcgcgtcaaaatgaaaaatggcgtcccaaaccgttccaagctttatatcagccgcaccgagcgcaatcgataatgcggcgccaaaaagcagcagcatgattccgccggccaggacaaatacagctccgagcggacggctgatcggtctctgttcttcatcagtgccatccgcgccgttgatatgatgtatgtttttgtaagagctcactcgatgccattcctttcgatctttttaaccgataacgattatcattttcatgtttagtataacaggcctaagcaaaaattttaatcaaaattttcggcaggaatcaaaaagccagccgatcttccgctaaaagacccggctggcaaagagctttatcacacttgattatttttgaactttttgtagacgaacgggtagatcgcaagaccgacgaaaaacagcccgattcccaagataaaggtggtcaagtcagacgtgcctgaaacgatgacccataaagagtacgcaagagcggccaaggcaatgatgccgtctcctgttcttgaacctttcagctcgccgtatgtctcccctttgaggatgagcttcaagctgaaaagagccgctatgagataagggacaaggtaagcgagcgtcgccgacgttgttaaaaacgtaaaggcttcgctgatcgttcccgaaatcgttgagaaaataaagatctgcgacatcacgtttgtgacgatcaatgaattgaccggacttccctttttattcgttttcgcaaagaaagcaggaaaatcaccggcttttgccgcctgatacggaacctctgcgccgattaaaatccagccgagcatcgatccgaacaaagaaacgattgccaagaccgccataatcacgctgccgaagctgccgataatcacgtgcagcacatcaacgaacggtttatctgatgcctggagctgatcgtgcgggatgacgcccatcgtaattaaagtgatgatcatataaatgccgagcgcaattaacaggccggtaatggtcgcgcgtttgacatcacgctgggatgatgcgcgccctgataagattaccgcagactcgatgccgacaaacgcccacagcgttgaaatcgccgcattgtgaacctgtccgcccagccctatgcttttgccttctgattcgattggaaaataaaatgattcgaataatgccgtttgaaaaacgaacaaacctgcaacaataaacaggacaaacccaagcactttggaaaaagtcgccaaaaagttcagcttgcccgctccatttatgctggagactaggataaaatgcgtcccccataacaaaatcgtacacacgatgaatgtcaagagctggccaagtgtaacggggtgtccgccgaattcaaccagctcgcgtccgtcggttaagatcggcaagaaagtcgtcaaatagcctgcaaggcttgtaatgatggccacgttgctgatccagctagccacccaatacccccataccattgtaaaacctgccgcattcccttttttagggtctgagaataaagctcttgcatagctttgcggacctgctttgagatccgggcggcgaatggataaatggccgaatacaagggcgatcatcagcacccccgcacccgtcaccagccatgccgccgttacgccgagcgggctagccgtctgggcgagtgtgctggggagcataaaaatccctgagccgaccatattgccgacaacaaaagccgtaagaagccagaagccccatttttttgtctgttccataagatataacctccgagcattttataaaaaatatgccggaccagaccgtgagatcattcaaaataaaaaaagcatgaacaaaagtccatgctttggttaaacatacactcttgatctccggatagccctccgcgggaatacccgcggcagtcctgcacttattcaatgcagacccagcataaagaatgaatggcttccttatgcttcggcgctgatgccttttgcatatgatcatcggccccatcagcctcacacatgcgactcatcatccgcgcaacctctacctcactaagagttaagagtgaggatttatcacatattctgaaaagaggttaccagagaaattttgatctgtcaaagggaagtgatggaaaaaacggacagccgcgccaaaaggccgccttttttggcagccttctgaagaatggaagacgggctctctccatctgtcatttatcggttatttttctttttgttgaccgcctcttgcagagggtctcctttcagcgcttgtcctgcgtcttcaagcgccccccgaacggcgttttggtccttttccttatttcctctatctttattgaagaaaatacccaaatgaatcacctctttaaaaatgtggtacaattttaatttggcttatcaaatttaaattatgcagaaccttggaatgtgttttttatctgaaaacgccatattttagatgtaaacgcgccgattgtttaggaaaatgtttttttcagctgacaagttgttaccatctgtcttgaaggccgtcagaactcttgatatagttttcattaggaaattgttataggtcttaaaggagaagcgatatgacaggaaaaacacacatcatgggaggggtcgcttcttgtacggctgctgcttatttttacggatatgatccggtgttcatgacagcctcgggcgttatcggagcattgattccggatatatgccatacaaaaagcaagataggcagaaggcttccgattttatcagcagtggtcagttctgtcttcgggcacaggacgtttacacacagcctgctctttttgctcatcacggcattcgcgacacatttatattttgcagatcagagcatacttgtcggattgatggccggaatggcaagccatctgctcctcgatgccgggactgtaaacggcatcaaacttttctttccgtccgccattaaggttcgtctgcccctttacattaaaaccggcgggaaggcggaacaagtcgttcttgctgtgctcaccgttgtttcgtgctattttattgcgaacttgatcgcctgacgaaagggacggtttgaccgattgctatatgatgctttttttagtcattttatcttggtgttctttacctgcggggattatatgtgaggagctatttatatgaaagaacaattttttaaaaagcagtggtttttatgcctatccatatttttcatatggatgaagacgtacttcatctacaagctgggctttaatttacaaatcgacaacgcacttcaggaactgatcctgtttatcaacccgcttagctttctcatccctgtactcggcatcagcctcttttttcgcgaaaaatcgcagcgcatctatttaatcggggctaatgtcgtcctgacgggcatcttgattgcaaacagcattttttatggtttctacatcgatttcatcaccattcccgtcctgttccaggcaaaaaacctcggggggcttggaagcagttttcaggagctgtttaatccggttttcatcgcgcttttcctggacctggctctcatggtctggctggcaaaaacgcgcgaaagaaccggcaaaaagctttccgctaaagccgttaagatctactatgcggcagccgccggaacggtgctgtttaatctcgccctgtcggagctggatcagccgaagtttttaagctactcttacgacagggaagtgcttgtaaaaaatatcggcttgtatcagtttcatctgttggacggcatttcacagacctttaatttgacacaaaaagcggtcgctgatgaaaacagcctggcaacgatcgaaaactacacaaatgccgactacagcaaaccgaaccaagatatgttcggaattgccaaaggacgaaacgtcatctttgtaacgcttgaatccacccagacatttgtcatcaatgaaaaggtgaacggccaggaaatcacgccgttcatgaacaagttcattcaaaaaagctattatttcgaccatttttatcagcagaccgaacaggggaaaacgtccgattcggaattcattgtcgctaattcgctctatccgtctctgagcggttcggtgttttttacgaagagcgagaatgcgtacaattcgatgtataaaacactggcgaaccacaattacagaacatcggttttccacgccaaccataaaaaattctggaacagggacgtcatgtacaaagccctcggcatcgacagcttttatgacgtctcccattttcatgtgacacctgaaaattcaacgggctgggggctgaaggataaggagtttttaacgcaatcggccgacttgatgaaagacttgccgcagcccttttacagcaacctgatcacattgacgaatcattttccatttcaaattgatgacgaggataagctgatcgatgagtacgattcagagagtgacattttaaaccggtatgtcacgactgtacgctatgaagacgaagcattgaagcatttcatcgcaaaactgaagaaaaacggcctttacgacaattctgtgatcgtgttcatgggagatcactacggcatatcagaagcgcacaacgatgcgctggctcaatttttgggcaaagacgaaatcaccccctacgataccgttcagctgcagcgggtgccgctgattatccacattccgggggtaacggatcaagacccgaaaacgatatccgaaacaggcggccaaattgatgtcaaaccgacattgctccatttgctcggaattgatacaaaaggcatgattcaattcggcaatgacctgttttcgaaagaaagaatgcctttcgctgtgttgagaaacggcagctttattacagatgattatatctacacgaaaaatacgtgctacagcaaaaaaaccggggacatgatcaacgatggagaggacaaatgcggccctctcatcgagaaggcgaatgaagaactttccctttccgataagattattaacggtgatttgctgagattttacaaaaaataatccgtcccctttaaaccggcattctcgccggcttaaaggggctgtttaaattgagggacagctgggtattatataccgaatgttaaaaatgaacttgcggttttgcagttccttcgttaccctaaatgaaaagagaagttatttcgagtgccgattatttcataaagtgttataaaaaatgataaataagaaggttttaatatgagtgaaacacagcacaagacaaatcaattgccgattgttgccgtcttgattatggggacatttatcgccattttgaatcagacgcttttgacgacggctctgcctccgattatgagggacttaaacattacgccggggcttgcccaatggctgacgaccgtttttatgctcgtgaatgggatcatgattccagttacggcttttttaattgaaaaattcacaacgagaaagctgttcatggcggcaatgtctttatttacggccggcacgctgatctgcgccttgtcattcagctttccggcgctgattgcggggcgcgtcgtgcaggcggctggcgccggcattatgatgccattgatgcagacggtgcttttattgattttcccaaaggaaaaacgcggatcagcaatgggaatggtcgggcttgtgattgcctttgctcccgctgtcggaccgaccctgtcaggctggatcgtcgatcgctatccttgggaagtattgttttacctgctgcttccgttcgccgtgatggacatgattgccgcgcactttattttaaaaaatgtcaccgaacagacatcgcctaagatggatgttacttcaatcatactgtcttcgcttggcttcggcggcattttgtacggcttcagcagcgccggtgttgccggctggacgggtgcggacgtgctggccggcttcgcggtcggcagcgttgcgctgttttggttcatttggaggcagctccatttggaagagccgattttggagttcagggtatttaaatatccgatgtttaccttggcgacgattatcgggatggttgtctttatgtcgatgatcggagctgcgacgatcgtgccgatgtatatgcaggatatgcgccatttcacggcgatggagtcgggaatgatgctgtttccgggagctgttgtgatggggctgatgtctccgattaccggaagaatttttgacaaaatcggcgcgcggattttgagcatcaccggtttgacggcgatcttcgtgaccacattgctcttgacccatctgacaaagacgacgccttttgcatatttgtctatcgtctatgcgattcggatggtcggcatggggatggtgctcatgcctgttacgacagccggcttgaaccagctcccgcgccatttgattcctcacggaacggccatgaacaatacaatgagacagatgtcaggatcgatcgggacggctgttctcatcaccatcatgacacagcgtgcgcttcttgaccctgccggtccgtcttcggatacagcgatgattcacggcgtcaatctggcatttatgaccgctgctgcattgtcgggaatcggattggttctctcattctttattaagcagcaccgccgcggacggctcgacggcagcaaaagaaaacaagcgaaaggccgcttggccattcatgagaaatgaaaaatcccgggtttataaaaacccgggatttttttatgattattcgaatccgttaaccattgtgtccggatccggaccgacgcgctcatctttattaagagcgttgattttttcgacatcttccgccgataattcaaaatcaaaaatgtcggcattttcaataatgcggtgttctttgatggacttcggaatggtgacgacttcattttgcaaatcccagcgcaggatgacttgagcaacggatttgttgtattttttagcgatgtcagtcagcacctgatcatcgaggagttttccctgcatgagcggagaccatgcttccacctgaatgccttgcttcttgcagtagtccctaagctcagtctgagtgaggcgcggatggaattcaacctgattgaccatcggtttaatttccgcatcttccaataagctttccaaatggtggacattgaaattgctgacgccgatcgctttcactctgccgtctttgtacagcttttcaagtgcgcgccacgtatctttatatttgtcttttcctggccaatgaatcaaatataaatcaaggtagtcaaggccgagttttcgaaggctttcatcaaaagccgccaatgttttttcatatccctggtcactgttccaaacctttgacgtgatgaaaagctcttcgcggggaacgcctgattccttaatccctttgccgacgccttcttcattttgatagatagcggctgtgtcaatgctccggtatccgtttttaatggctgcttttacagattcaacgacttggctgccttcttccactttgaaaactccaagtccaaaccatggcattttcacaccgttatgtaatgtcacagtgtcctttaaactgcttaccattttgaacgaccacctttctttttttcagatgcttttaaacgcaccgcttttattatctcatactgggtggattttacaaaacaacttgctcaaccgatggaatgagccaaagcaagcgctccggtgattccctgatcgtcgccaaggcccggcggcacgatgtattcttcaagatcaggcaggtcgacatatccgttcaaatattcggccagctttttgcgaatcagcgggaacagctgctgctgcttcatgacaccgccgcccatgatgattttttcagggcacagaatcaagatatattgcatgagggcctgtgctaaatagtcggcttcaagctcccaaacttcctcgttttcagccaaatccttgccctttttcccccatcgcttttcaagcgccgggcccgatgccatcccttcaaggcagtccttgtgatacggacagattccttcaaacgtatcctgcggatgccgtctaatgagtaggtgacccatttcaggatggagcgtgctctgtacgagccggccgccgacaatcgctcctgctccgattcctgtgccgactgtgatatacaagcagctctccaggccttgcgcctctcctttcgtcagctctccaagtgcggcagcgtttacatcagtcgtaaacgaaaccggaatgccaagccttttttccaattcgggaataaacgggtaccccttccaggctaatttcggggtattggttatgtatccgtaatcctctttattttttgcaacggatataggtccaaaagagcccactcccattgatgtgagctgatacttgctgaagaaatcggtcagctttccaatggtctcttcaggcgtctccgtcgggatcgtcagcctgtctatgatttctcccttttctgttccgactgcacaaacaaactttgtgcctcctgcttctattgcaccgtaatgtttcatcctctcggctccttttcatctgtttgaattgctctaattgaatcataaatcagacgatgaaagaaagcaatcgcactgaacaatggttcaccagagcatgggagcttttgatgctgacggaagaaagcttcccgaaaatgtggcagttttcaaacaactgccgcgttcgctttttcgcttaaataggcttctgaccgcttgatcgtaaccgtgaaaaagaggattttttcaagccccgctcgaagctttaataaggagggatatcatgaagcatccattcgacaatttccgttctttattcccgaaattgtctgatcatgttcatcttgccgcatgttccggaagcgcattggctctgcctgttgccaaagcggtcgatgagtatcagaacggccttttaacagccggtgcagactggaaagcacatctcgacaagatggatgagaccaaggaaaaattcgcccggctgatcggtgctgaaaaagaagagatagccgttttgccgtcagtatctgacgcagtggccgctgtggccgccgcaatgccgcagccaccccgtcgaaggcagatcgccttcacggatatcgattttcctgctgtcggccaaatttggcttgcgcaagaccgcttcaaagatcacctcatcatcattcaaagcgaagatgggatgattgacttggaacaatacgaaaaagacgttaccgatcagacgctcttgacgtgtgtgccccatgccggctatcggaacgggtttaagcaagacataaagcagattgccgagattgttcatcagaaagggtcgcttttattcgtcgacgcctatcagactgccggccacattccgattcatgtcaaagacatggatatcgacatccttgcggcggggacgcgcaaatacatgctcggcattcccggaacggcttttttatatatgaaacgcgaactttgcgaacaatttgagccaaaaacggccggctggttcggaaggagcgcgccatttgccttagattcaggctttgcggaaggtgcgaaacgcttcgagtcggggacaccgtcatttatcagcatatatgcggcagacgcggcattgaagctgctgcttgaagcggagcccgacaggatcgagccctatctgcggcagcttgcggcattctctttgcaatacggtgcggaaaaaggcctgaagatcacaggacccaacaccgtacataacagaacaagcctgatctcggtgtatgccgaagaagccgcccgtgttgaatccctcttgcgtgaaaagcatatcatcgtctcaaagcgaaacaacgtcataagaatagccccgcatttttacaatacaaaggaggaaatcggatttgtgatggatgagatcgcggcaatcgtaggctaagcccccggctttaaaatggacagaatgcgattttttccttaaactataaaaaacaattttcatcaaggaatgagacaaaatggagctttatatcgaaggtgaattagaagagcataggaagctgccgcaccgaaaagttttgtttgccattttggctgttttgctagggtccgggattaccatcggatatatcgtgtatacgcatttttattcgatgaatcatctgccgaaaggaaattggtttcagtcttccgcttcgccgaatcaagcatacaacctgaatttgtatagagtgaacaaaggcgggggaacgaactccccttccgtcagaggggaattgacaacggttgccaccggtgaacgaaagaatatctattggggatacgaagaagaacatgccaaaatcgaatggcaggacaaataccatgtgtccatcaacaacaatgtgctggacgtcagaactgatatatatgatggaagaagagagtgacggcgtcactctcttctcgtgtacatatcatttgggacgccgtttaaaaaatgcgtttcttttccaatggaaaagaggtgcagctcatgcatcgccctcgtgcacgccgtataaaataaagtccgctctctttcctttttgtattgcttttcagaagcgtcataaatgatgacggcatcaaattcgatccctttcgccaaatagacgggaatgacgaccacgcctttttgaaacgttctcgtttctttatcgatcagtttaagctctgcatgctgctgaagatgctggaacgcatccctgcattcccggactgttttacagatgactgcaatcgtctcaagtccttctttttgaagggcggtcataagggaagccatctctttatggtgtgcatgaggatcggctgatattgtcaaagtcggttttttgccgttcctattaaaagcttcgatctcttcgcccccttcgatgatgcgctttgtcaattcaacaatttctttcgtcgacctgtagctgcgcttcaaggtgatgatctccgttttttcgccttcaaacacgcctcccgacagaagcgtcttatcgtgataggcatgggcaagaatcgcctggtttaagtctcccagcatcgtgatgctgcacgcgggaaacaagctctccaaaaaagcaagttgaaaaggcgtgtaatcctgggcttcatcaatgaataaatggcggattgccgtgtttttccccccgcctttcagcttgtttttcatatataaaaaagggacagcatcttcataaagcagcttctcaaaacgaaagcttttctgagtgaatgtgcaaatgctctgccagtcatcagggcgcgtttgcggggtatagcgtccggaaaaaagctgaaggtatgttcctttaaaatcaataaagccgaacgcttttaccacttgcttgagcggcttgaactccctttcggcaacgatggaggcaaggaggtttcgctccctttcataatcgtcaaacgtattctccgtaaagcgctgttcctcctgaagacgtttataagcctttaagtattcctctttatccagcagctcgctttcttcgatgacccagtctttttttctttcctggcgttcatatttattcaggagctgcaacagccattttcccgtttgttcaatccggttggacagcgtgtctgaatgatcaagggccgcgaaaaatttccgcatctgaccgcttgtgatgatcctttttccgcgaaaggtgatatgtttaaacaccaggtgcccttttgccaaatatttgacgtaatcatcgatgatgcctttgaaagccagactggatttcaattcaatcgatttcatccggatgcgctgctcctcaccgtctgaagcggttaaacaatattcaagctgatcgaacggagtctcgcatggtacctgctttccaaggcggcgcgctacaaattcctggaacgtcgtctgctggatgttttcctctccgagctcaggcagaacattggcgacatagctgttaaaaagcaggtttggagagaatagcagcatctggctcgactcgatctgcccgcggccgcggtacagcaaatatgcggcccgctgcaatgccgccgacgtttttccgctgccagccgctccccgaacaattaaaaagcggctcttttcgttccgaatgatctgattctgttctttttgaatcgtcgcgacgatgcttttcatctggatatcggcctgctgccccagcacttcctgaaggacttcatccccaatcgccatatccgtattaaacatcgctttcagctgtccgtttttgaagagaaattgccttttcagctcaatcgttcccctgaccgtctcgtccggaacttcgtattgagccgcgccgggtccatagttatagaacagactggaaatcggcgctctccaatcatagatcaaaaaccgctcttctttttcatacattaaagaggcgagtccgatgtagacggactcagcgttttcttcgccgtcctccaaaaaatctacgcggccgaaataaggcgattctttcacttttaacaggtttttcagctggctgtaaaactgcttatggctcctttccctctcagccaaaacctcagcctgctgtttaatgctaaaaaatgtttcaaccgcttcattttcatcggctatgtttacggtgacatcgctccaaaaatgtttccgtaaatcgatgatatcctccttcaatccgccggtttttccctttagagaatgaagcttttgatccaattcctttaaaacaagccggattcgtttttcctcttccagccattcctgaccgttttcctgcacgctgaccactccctaaaaagatttgacatcgaaaaagattcatgataaaataaaaatggataaaattataattattgaaattttatgttaaaatacacttcatcttatcatataacctttggtcaaatcaatataaaaagccgatttttcaatcaacgaaaaatcggcttttttctattcagctgtgggaccgcagcgaacggttcggcagcttccagttgaacatgtacgaacatacacggcacgcgaccagcaaagcaaacaggatatacaacgtgagcggcttctccgcccagcccatgccgataatgaatccgcccaaagcggcccaaacggcgtaaatctccgttttcagcacaagcggctttcttccggccagaaggtcccggatcattccgccgccgcttcctgttaagaccgccgcaacgatcactgcgctgaccggatggttcatgtgaacggcataaagggctccttgtatcgcaaatgcggcaagaccgatcgcgtctgaaaagctgccccagatgctccagtgctttaacaggagcttcggaaacaaaaaaacgatcgtgatcgagacaagagagattagaaacagactcccctgctcccacaaggcggacactggaactccgatgagcaggtttctgatcgcccctccgccgaacgctgtcacaatccccaatatataaactcctaaaatatcatactcttcttccattgcaacgatcgctccgctgatcgcaaaagcgacggttccgatgatgctcaacacttcccaagccatctaagatgtcctccatactaaacttcaatctttttgattttataacttctccaacctttaaatcaaccctctctgaatcaaaatatcttataatatagaaagatgtttttaaaggggtggaaacatgggacaggaggtcatcatcgaaaaagcgaaagccgagtgggcgcacgaatttgaagctgaaaaacaacagctcgcagatgtcctcggaaaaaaagttctcgctatcgaacaaatcggcagtacctctgttcccggccttgcagcaaaaccggtactcgatttgatggccggcgtgagcagtctcagcgaagcttcagttggatcgaaccgcttcaggagctcggctatgagcacgtatttcacgaagccttcccagccaggcgtttttttcgaaagggaaagcggagggcgggcacacgccatctgcacgtatacatttttcaaagcgaagaatggaaaaatcagctgagattccgaaattatttaagaaagcattcagtcgagcggcaagcctatgaaacattgaaaaaaacttggcgcggcgttttccatattaccggactcctatacaaaaggaaaagaatcggttcatcacagccgtgattgaaaaagcaaaacattcggaaaggagcggcacggcatgctgaaaaagacaaaacataaactgcttactatagccatcgccttcattatggcggttttgttgtactactatgtccaagttacgaagtgaaagcgggattatacgtgcaaggccattctgactgttttgaggatatgcccttcgaaatcttcatcatattcggcgacatcctcaaaacccttcgccttgtaaaagttttttccggtgcggttttctttttcaacctctacaaagatctttttcactccctttaaatggttcatcccctcttccaataatgcggttccgatgccttttccctggtattccggagctaaataaacggctgcgagataggctacccctccttctctgacaaaggagtagttggcaaagccgacgatttttccgtccgcttccgaaacgagcattaacgagtgttccaaacgctgctgcattctttcgtcattgtacgctttctgcaagaacttctcttgaatatcgaaaggaatgatcccttcatacgtatgattccagcttgttttggcaatctgctgtacttgagggatgtctttctttttcattttgcgaatcttacactccatcctcatcatccttcacatctatttgataatttccaaatattataacatcctttctattgaacatgtataagaaataaaaaaagagcattgtcagacaatgctctttttactcgtctttccccttgagaaagcacataaaaatgataatcaaaataaatgcaataagggcgagaaacggaatcgtgatgaaaccgaaccaattgatatactgccctgagcaaggcactcctgtgacacacggtttaatgccgttgaatccgggaattttttgttccatgtagtgcatcagggaaatgcctgcgccgatcaccgccatcggcagcacgtattttttcacacgggcatcgccctgaaatgtcgcaattccgagaatcagcacgagcggatacatcataatccgctgataccagcacagttcgcaaggaataaatttacggatttcgctgaagtacaagctgcctagcgtcgccgttaatgagacgatccaggcgccgtacagaaaaagcagtttatttttcatcagactggcctttcagctctttctcgatcgtttctttgattttgtcataatcaaacggtttgtcgatttttacgccgttgacaaagatcgtcggcgtcgagtctacaccgtatttgttgatgagcgaattgtccgtttttaattgctcagcgaacgttttgtcatttaagctgctgacaagcttatcgcgtttgattttcgtattggcttccgtgatgtccgccaattttgccggcgtcgcccactcgttttccatcgtgtcattgtcaggctgcgccttgtacaacgcctcatggaacttccagaatgaatccggatcttccttccatacctgctcggaagcgagggcgctcaattcagagcctctgccgtgctgttcattgacgaagttaatatatgaaaaattaacttgatctttatcgatgtaatcctttttcaaatccggaaagacggtctcagtccactgtttgcagctgggacatttgtaatctccgaattccgtgatcgttacagccgcatctttgttgcctagaagcggctgtccttcagttgaaggcttgtcatcaaaggtttgcgaagcattttgggtttgattgttgattacgacaagtgcgccgatcagaaaaacgaccacgactgtcataatcactgcaaatttcatcggtgactgctgtttcttcttcacttagacacctcattattcttattttttagtatgccagtttgataacctctttcattttaacaagacaagccgcattcgtgaagatgctaaaaaaggaatttccagttcattaggtggtaaaaaagttacatttctttcacttttaataccctcatcgcatttaaaacagccagaagggtaacaccgacgtctgaaaagacggcttcccacatcgtcgcgatgccaaaagcacccaggatgagaaaaactcctttaacgccgagtgcaaaaataatattctgccagacaatcgtcctcgtccgcttggcaatgctgatggcttccgcaatttttgaaggctgatccgtcatgatcacaatatcagccgcttcgactgccgcatcagaaccgaggcctcccatggcaaccccgatatccgctctcgccaagaccggcgtatcgttgatgccgtctcctgcaaaaagcagcttttcttttggaagtttttgcttatctaatgtttcaatacggtccaccttgtgctgcggaagtagctccgcatgcacttcatcaatggacagctgttcgccgaccgcctcaccggtgtctttcgcgtcgcccgtcagcatcaccgtttttttaatacccgcttttttcaaagcggagatcgcacgcttggcatcctctttgatttcgtcagcgatgacaatcgagccgataaacgtatcgccggcggctacataaacaacagttccgatttcactttccttttgatactgtatgccggctttcttcataagcttggcattcccggctaaaatgacggctccgtctacaaccgctctgacgccgaagccggccgtctcgctgtaatctttgatgcggtccgcttgtacttccttcccgtatgcttcacggatcgactcggcgatcggatggccggagaaatgttcggcaagcgccgcatattcaagcagttcatcttctttgacatggcttgcaggcgacagcttgacaacggcaaattccccttttgttaaagtgcctgttttgtcaaaaacggcgtatttgacatcattcagcgcttctaaataattgccgcctttcacgagtatacctgcttttgacgccgctccgatgccgccgaaaaagccgagcggaatggaaacgacgagcgcgcacggacaagaaatgaccaaaaagacaagggcgcggtacacccaatctgacagcagggcgcctgaaataatcagcggcgggacaaaagcgagaagaagcgcgattatcacaacgaaaggcgtgtaatacttggcgaatttggtgataaaattctctgttttcgcttttctgctgctggcattctgaacgaggtcaagaatctttgaaacggttgattcactgtattctttgtccacttccacttcaagcacgccgtttttgttgacaaatccgctcagcacctctgttccgggagcggcttctctcggaacggattctccggttaatgcggacgtatcgacaagcgatttgcctgcccgcactttgccgtcaagcggcactttctctcccggcttgacgatgatgatatcgccggctttgacctcatcgggagacactttgaccgttccgccttcggtttgaagattggcatagtcgggacggatgtccatcaaatcgctgatcgacttccgggagcgggtgaccgcggctccctggaacagctcgcctatttgatagaacagcataaccgccacaccctcgggatactgctgaataataaatgcccccagagtggcgatcgtcattaaaaagtgctcatcaaaaacccggccgcgaaagatgtttttgacggcccttaatacgacatcgccgccgatgatgaggtaagctaggaaaaaaagaagccactcggctgcggtgccgccgggaagcagaaagcccgccgcaccgagaacggttcctgcagcaagccttgcaaccgtttttttaaaccgtccgtcgctttctggtggggcctgttttgtcccttccttcagcgtcgcgttgacgtgcggttcgatctcggttacttttttctttattattaaagaaatgtcttcgccgctgttttggtcgacttggacagtcagcgtgcttgttgcaaaattgaccgaacacgcttcaatccccttcataccggctatctcatgctcaattttttgtgcgcaattgctgcagtcaaggccgtttagcgtgtactcctgtttcaccttttccatctctctcacctttctttttcagcgccggctttattttatatatgagcatatacgcatatattatctacccttattatatgcttcatccgaaaaatgtgtcaatcgatctttgttatcatacgcaccggctgtttccgtgtttaccctgatccgcgtctgcgaaaactctgctggcatattggaagcaatgcccaaatatacttagtttagctattaaactaacaagcttttttcataaggagtgagcgcttttgaaaaaatcgtgtctgatgatcgtctgcctcgcctttcttcttgctttttccgcaggctgcaaaagcagcaccggcacaaagcatacggaagaaataaaagtctgggattactttaccggcaagcagcaggatctttatcatgagcttgtcgaacagtacaatcggtcccaggaccggtacaaggtcgtaacggagtacattccttttaatgaagtgaaaaagcagctgtctgtcggtacagccggcaatgccatgcctgacgccgtattccttgacaatgtcgacaatgcttcattcgccgctatgggcgtgctcgaagatttgacggagaaaatcgaacaatgggggcaggctgaccagttttatgaggggcctctatcatcagccggatatgaagagaagtactacggcatccctttcgcaagcaatgcgcttgccttgttttacaacaaagacctcttgaagaatgcagggatctccaaaccgcctgaaacgtggagcgatctgaaaaaagcggcggaaaaaacgagcaaaggccaaacgaaaggatttgccctgtcagccgtaaaatcagaggaaagcgcttttcaattttatccgtttcttttgtcttccggagcagatctaaaacagctgaattcaaaagaagcagcctcttctcttcagtttttaacagatctgatcaagaaaggcgcaatgagcaaggaagtgttaaacgccacccaggatgatctggccagacagtttgcagcaggtcagctcgccatgatgatcaacggctcctggaatattgaacggctggaagaagccgaagacttaaattacgggattacctatatcccgaaagatcaaacattcgcttctgccctcggcggcgaaaatattgccgtcgttaaaggaaaaaacaccgccggcgcctgggattttatcagttggctgatcgatccggagcggctcgaaacgctgacagcagaaacaggcgtgtttccgccgcgcaaagatttgctcgaatcatcgagccattggaaaacagatgataatttaaaagccttcattccaatcatagagatcgcatcagcccgcggcccttcgaaagactggccgaagatttcggaagctttgcagactgccctgcaggaagcattgagcgaaagcaaaacgccgaaagaagcgctggatgaggccgcgcaaaaaatcagcgccttaaactagctttaagcgcacgaaggagttttgtcatgatcagagccattgtccgtaaatgggaagggtacttttatttgtttccggcagttctttttatgcttgctcttatcggttatcctctcatctacaacatgattctcagctttcaaaacgtatcgcttgcaaatatagcctcacacgatatcagctttatcggaatcgaaaattatcagcggcttgcccaggataaagtattttgggcatctttaaaaaacacgctgctttacacggccggaagcgttgtatttcagtttgcaatcggctttttcctcgctttgtttttcagcatgaagttcaggcttgccccgtttctcaggggattgatgatggtgagctggctcatcccgctgacggttacggcgcttttattcaagtttatgatggcttcaaacgaaggagtgttcaatcagctgctcctatcatggggaatgatcgacaccccgatcccctggctgtcagacccgaatatggccatctggtccgttatcatcgccaacatctgggtcggcattccttttaatatgctgctcatatccgctggactcagctcccttccggaagacgtctatgaaagcgcaagccttgacggcgccaatgcttttcagaaattcatccatctgacactgcctttattgcggccggtgatcactgtcgtcatgatgctcggcttcatttatacgttcaaagtgttcgatcttgtgtttgtgatgactggaggcggtcccgtggacgcaactgaagtcctgtcaaccgtcagctaccgctactcctttgacgaatttcaattcagcatgggcgcggcaagcgccaatgtcctgtttcttattcttcttttggtcagtctcgtctatttgcggctgatcaaaaaagatgaggtgatgtcgtgaaaacgaaccaaaaggaatggctctttaacattattggcgtcctcgttacggccggctttttattccccgtttactggatgattgctacggctttcaaaagcgatgccgaattgtttaaaacaccgcctttattgtggcccgagacattccgcacggccggctttgaagctgtgttcacttctggcgtcgccggatactttttgaacagcctcctgatttccggggcggctgccgtcatcgttctcatattggccgttccttccgcctacggcttggcgcgctttcggatcaagggcaaaaaaatgttcattttactgtttctcatcacgcaaatgctgcctgccaccgttgttttgactccgctgtttatcgcctttaatcaactgaacatattaaatacgtatatcggaccgattttgacgggggcaacgctcggcgttcctttttctgttttaatgctcagaaccttttttcttgggattcccaaggaccttgaggatgcggccaaaatcgacggctgcagccgttttaccgcgttcatccgcatcattttgcctatcagcgtacccgggattgccgtcagcggagcggtttctttctttttcacatggggagatttgatttacagcatgacattcaaccgaaatcaggagctgtggccgctgacggccggcatttacaatgtgatcagccaatacggaatccagtggaatgatctgatggcatttgccgttttatcggttctgcctgtcatcatcatttttatgctgcttcaaaagcagcttgttaaaggacttatcaatggatctatcaagtaaaaagaaagggtgttttcgatcatgaaattttcagacggctactggctgacgcgcgaaggatatcacatcaacacgccgaaagaagcctacgaccgaatgattgatcagcaatcattgaccgtgtacgggcctgtcaaagcggttcaaaagcgcggggacacgctcgacacccgcatgctcaccgtcagattttcgagtccccttgaagacatgatccgtgtgcaagtgttccattttcaaggggaaacgcctcggaaacccgactttcaactgcatacggcagatgttgaaccggtcatcaccgaacacgatgatgcgttgaccttccaaagcggcagcctgtgcgtcgaagtgagcaaaaacggttggggctaccaattttcacgtgatggacagagcctgaccgcaagcgaatcgaacagcctcgcctatatcacaagcgatgacgggcgcacctttatgagggaacagctcaacatcggcgtcggcgaattgctctacggccttggcgagcgttttacggcattcgtgaaaaacggccaaaccgtcgacatctggaatcaggacggcggaacaagcacagagcaggcatataaaaatgtgccgttctatttgtcaaacaaagggtacggtgtttttgtcaatcatcccgagctcgtctcgtatgaaatcggttctgaagtcgtatccaaagcgcagttttcggtcgaaggagaatcgctcgactattttgtcatcagcggcgccgaaccaaaggatgttttgaaacgctatgccgcgttaacgggaaaaccggcgcttcccccggcctggtctttcggcctctggctgtcaacatcgttcacaaccgactattccgaggagaccgtgacccgcttcatcgacgggatgaccgaacgcggcatcccgctcagcgtgtttcattttgactgcttctggatgaaagaatttgaatggtgcaatttcgaatgggatgaacgatattttaagcagcctgaagccatgctcagccgcctgaaagaaaagggcctgaaaatatgcgtctggatcaacccttacatcgcgcaaaaatcaaagctttttcaggaaggaaaggaaaacggctacttcttgaaaaacagccggggggatgtatggcagtgggaccggtggcaggccggaatggccatcgtcgacttcacaaatgaaaaagcgcgtgactggtattgttcaaagcttgaaagcctgctcgacatgggggtcgactgctttaagaccgatttcggagaacggattccgagtgacgctgtttactttgacggatcagatcccgaaagaatgcacaattattattcttatttatacaacaagaccgtatttgacttgttgaggcaaaagcgcggcgaacgggaagcggtcgtgtttgcaaggtctgcgacggccggcggccagcaatttcccgtacactggggcggggattgttttgccagctatgattcaatggctgaaagcctgcgcggcggcctgtcgctttctctttcaggcttcggcttctggagccatgatatcggcggatttgaaagcacggcaacagccgatttgtataagcgctggaccgcattcggcctcttgtcgacgcacagccgcctgcacgggagcgagtcataccgcgttccgtggctgtttgacgaagaagcggccgatgtcatgcggtattttgtcaaactgaagcacaggctgatgccttatttgtacgccgctgcacatgaagcgcacgctgaaggcattccgatgatgcgggcgatgctcctcgaatttcccggagacaacacctgccactggcttgacagacagtacatgctcggcggaaggctgctcgtcgctcccgtttttcaggaagacggcgctgtccgttattatttgccaaaaggcacgtggacacaccttttgacgggaaaagagacggaaggcggagaatggaaagaagaacggtacggctatatggggcttcccctgttcgtcagggaaaacacactgctgccgctggggcaggaatccgggcgacctgattatgattatctcgacgatgtgacgttctgcctctatcatttaaaagacggctgtacagccgaacagacgatttacaatgaaaagggcgaagcaatgacactcagagcttcacggcatcaaaatacgattgccgtgaaaacaacgggcgtccaaaagaactggaagctgctcctccgcggtctttctgtcacctctgttattaacggagctgcggaagcgcttcaggagggaacagcggttcagccaaaagaaaaagaacgggatgtcttcatttatttctaaaaaggagtgatcaggatgctgaaaacgggccgcatcatcatattgggcgcaatgtgcacgatcctttccgccgccggtttcgatccgccgcagcccgcagccgctaaaagccaggctgatgaatatgagtatccctttcaagatcccagtctccctgtacaaaaaagagtcagcgacttgctttcacggctgacccttgaggaaaaagtgtcactgatgcatcaatatcagcccgccgttccccggctgggcattcccgcttttaaaacgggcacagaagcgcttcacggcgtcgcctggctcggggaagcaaccgttttcccgcaggctttcgggctcgcgcacacatgggaccgctatttaatcaaacaaatcggctcggcggtcggtgatgaagtccgcggcttccaccaccttgatcccgcggcaaacggagtcaacgtctgggcgccggtcgtcgatctgctgcgtgatccaaggtggggaagaaatgaagaaggctattccgaagacccctttttaaccggggaaatagcaaccgcctatgcctccgggttaaggggcgatcatcccttctatttgaaaacagttccaaccttaaagcattttcttgcctataacaacgaaacagaccggggattcagctcctcaagcatcgatcccaggaacatgcacgagtattatttgaagcccttcgaaacagcaatttccaaaaaagctgcgtatggactgatgccggcctacaattctgtcaacgataaaccggccattttgagcccgctgctcgacagtacagtcaaacgtagatgggccggagacgatttcttcatcgtcagcgatgcctttgatccttccggaatcgtcaatgaccacaagtattatgacagccacgaaaaagcccatgcccacgccgtaaaagccggcattgacaactttacggatcagggggaaaatcccgagctgacgagaaacgccttaaccggtgccttaaagcaaggccttatttctgaaaaagacctcgatcaagccttggccaatacgttcagcatccgttttcgcacgggcgaatttgatccggacgaactcaatccgtacagccgcctgacagatgacgtcatcaacagtccaaagcatcagctgctggcgaaaaaagcggctgaaaaagccattgttttactgaaaaacgaccaggatctgcttcctttcaatgcccggaagaatgaaagcattgcagtcatcggcccgttcggaaatgcgctttacgaagattggtacagcggaacgatgccgtatcggaaaaccccgcttgacgaaatcgcggacaaaatcggcaaagaccgcgtctcctttgctgaaggtctggaacaaagcggcttcaaatccgcgccgaccggaaagtttgtaactgcaggccgggacggcaaacaaccgctcacagcagcggctgataagcttgagaaaagcacggcattcgatgcggcggattggggagaaagcatcttcaccctccgcgcccaagcgaacggcctctatgtctcgcttcaggatgacggccggctgatcgctgatcagaaacagccgaacggccggaccgttaaagaaacatttcagttcgaacagcagtctgacgggacatttgccatcaaaaatacggcaaacggcaaatatctcactgccggtaaagacggcacattaacagccgccgccgaaaagccggcaacagcagcggaaaagttttcaaagacgatcatcaagagcggtacggatgaagcggttcagctggcaaaatccgcggacaaagccatcgtgtttgtcggcaacaatccttacatcaacggccgggaaaccgaagaccggaaagatattacactccctccggcccaggaaaatctgctgaaagctgtttctaaagccaataccaatacggtgcttgtcgtaacgagcagctatccgtttgctctcaactgggcaaaagcgcacattcctgcgatcatatattccgctcacggaggccaggaggcgggaagcgcattggcggacattctctatggagatgtaaatccgggcggacggctgacgcaaacttggcacacctcagtcaaagaactgccggatatgatgaattacgatatcatcaaagggaaaagaacctataaatatttcgtaggcaagccgctgtttccgttcggccacgggttatcctatacagcgtttcgctacagcgatttaagcctttcctctgacagcatcaaaaaagacggatctgtcacgattcgcgtcaacgtcaccaatacaggcggaagaaaaggagatgaagtcgttcagctctatacctctcccctgtttaaaacacgggttaaacagccgaacctggacctgaaagattttcagcgggttgaactggcaccgaaagaaacgaaaaccgtgacattcaagctgaaacagacagaccttgccttttgggatgtgacgagagaaacatttgccgttgaaagaggcccttacagaatatccgtcggcagctcggcggcggacatccgcaagacaaagcggatcttcgtccaaggcgaaacaattcgggaacggaacttgcgccgaaagacaaacgctgaagactacgacgactacaaaggcgtgctcatcaccgaagaatccaaatacggcggcgatgcggtaaaaagcagtacaacaaacgcgtggatcgcctaccatgatgtccgcttcaaaggcgaaaaaaggatagaagcaaaggttgcaagcagcggcgccggcgaaatcggcatcttcctcgaccatcctcaaaaaggaaagcaaatcggttcgttaaaagtgcctgacacatccggattgcaaaactggaaaacggtaaaagcttccgtccgaaaatcgacaggcacccaccgcgtcttttttgtcttcaaagggaaagttgcaatcgattcgtttcaatttgaaagataaaccggcaaacaagaaattttttaaagccatgcagcttgatctgcatggcttttaccgtttttcagcaattttagcgctttacaatttaggaatgatatattagaattcaatcaaaagttgcattaggtaaaaaaaatgtctttaggcaataaaaaattgccgaaacaaaaatattgtatgcaggttaactttcatatagacatagaaaggggttaatgaacgctatgaaacccgcaattaccgtaaaagatttatatgtttcttatcacggcgcagaagcgctccgcaatattaatttctcactcgatcaaggaatgatggcgggcattatcggaccgaacggcgcaggaaaatcaacgctgttaaaatccatgctccaattgattccaaaagataaaggcgacgtccgtctgctgggaaaaccgctcaaagatgtacgcaagcaaatcgcctatgttccgcagcgaaatgatatggattggacgttcccgatcaatgtcctcgacaccgtcatcctcggcacgtatcctgaactcggccttttcagacgtccgaaaaaacgcgataaagactgggcgtatcactgtcttgagaaagtcgggatggctgcatatgccaagcgtcagatcggcgaactgtcaggcggacagcagcagcgcgtttttctcgccagggcgctcgcccaaaaagcagagctgttctgtcttgacgaaccgttcgtcggtattgatgtgacaagtgaagaaatgatcgtcagcatcttaaaagaacttcgtgatgaaggaaagaccgttcttgtcgtccatcacgatttgagcaaagcggacagctacttcaatgaattaattttgctgaacaaagagctgattcaaaaaggccctgtctccgacatcctcaatcccgacgtgatgatgaaagcctacgaatctcagcttccgttcctgcaatcgaaaagaggtgcgatctgatggagtttatccatggtttgatggaatattcgtttctgcaaaaatcgctgttcacctcgattatggtgggcatcatttgcggcgtcatcggctgctttatcattctcaggggaatggcgctgatgggagatgcgatttcacacgcggttcttcccggcgtcgccatctcttatatgctcggcgtcaattttttcttcggcgccgtctttacgggcatcctgacggctctcggaatcggctatgtcagccaaaacagccggattaaaaacgattcggccatcggcatcgtatttacggcctttttcgccgtcggaatcatattgatcacgcttgtcaaaagctcaagcgatctgtaccatatcttattcggaaatgtgctggccgttcgttcatcagacatgtggatcacgctcgtcatcggagtcattattcttaccgctgtctttttattttacaaagagctgctcatcacctctttcgacccgacgatggcggctgtctacggcttgccgaaccggctgatccactactttttaatgacgcttttaacaatggtcacggtcgcatcgcttcagaccgtcggcatcatcctcgtcgtcgcgatgctgatcacgcctgccgcaaccgcttatctattgacggaccggctgtgggtgatgatctatttgtccgctttcctcggcgctttgtcagcggtcatcggccttggattaagctatacgtacaacctctcctcaggagcggcaatcgtgctcgtggctacgattttgttcggactttcctttacgttttcaccgaaacaaggcgtgctttggagagctgtgaaatcaagaagaaaacgggcagcgcttcaacaataaccgcaaaataaagggggaaaacaaaacatgaaatggaagcaaacattagcaattgcggcggcattgattctgattctcgccgccggctgctcctcgaaaagcagcagcgaagaaaacggaaagctgaaggtcgtcaccacctactccattctttatgacatcgtcaaacaagtcggaggggatcacatcgatttatacagcattgtacctgtcggaacagacccgcatgaatacgatccgcttcctaaagacgtgcaaaaaacgacggacgccgatgtcgtcttttacaacggattgaatttggagacagggaacggctggtttaacaagctgctggaaacagctgaaaaagacggtgatgacgcccctgtctacaagctgagcaaaggggtcaagccaaagcatctcaccgctaagggaaaagaaacggaagaagatccccatgcatggctcgacattgaaaacgggattcaatatgcaaagaacgcaagagacgcgctgatcaaaaacgatcccgaccataaagaagactacgagaaaaacgcggaagcctatatcggcaagctgcaaaagcttcatgatgaagcggtgaaccgctttaaagatataccgaaagagcgccgcgtccttgtgacaagcgaaggggcttttaaatatttcgcttcggcctacggcgtcgacgcgcagtatatttgggaaatcaacaccgaaaatgaaggaactcccggtcagatgaaaaaaatcgtcgacacagtgaagaaaaaggacgtcccggccttattcgtggagacaagcgttgacccgcggagcatggaaagcctttcagccgaaacgggcgtgccgattaaagcaaaagtcttcaccgattcgatcggaaagcccggtgaagcgggagattcctattataagatgatgaaagaaaaccttgaccggatccatcaaggcctcgccgaataaccaatgaactgctgtacaggatgtacagcagtttttttcttatgtttttccgattttaaagcagggtacaacgaagggaaaacgaggaaaaaggagtgtgtttcgtgaaatctggatatgaggaatgcatcaaagcctgccgagaatgtcttgaagcctgcaaccactgctttgacaaatgtctgatggaagaagaggctgggatgatggccgaatgcatccgtcttgaccgggaatgcgcggagatgtgcggttacgcaattcaagccatgacgcgcaacagcccgtatgccgaagatatttgccagctttgcgcaaaggtttgcgaagcttgcggcaatgaatgcagccagcacaagcatgaccactgccaattttgcgctgaaagctgctttgcatgcgcggaagcgtgcagaaaaatggcttcttaacttgaaacatccggccctcgagccggatattcttatgtaggaaatgtttattttttctccttccccctttctaaactgatacaatatgactataaaagggggttttatcatgaaagacagcgtgtttcaaatgacttctgacacatatcaatctctcagcgattcagaacggcatttgctcgagtacatttatcagcacttagacgtcatcgccactttatcgattgtaaaattaagcgaggatgcaaatgtttcaacagccacgattgtcaggttaatgaaaaaactcggatatgacggctacacttcttttaagtatgcattaaaagaaaaacaccacctcggacacgctccgctgatggatgatatcgacagccaaattaaacaggccgtgctaaagaatgaaagagaagttctggatacgattaagatgcttgatatcgggttgatcgaagatgccattcaaaaaatcagcaatgccgaaaaagtttacatcttcgcaagaggattgtctgaaatgattggaaccgagatgacgatcaagcttcagctgctcggcaaaaactgcgagatgcacagcgacccgaatattatcagaggaaagtcaaaaacactggccaaaaaagacctcggcctttttgtttccttgaacggcgagacagaagagcttgttgaagccgctcaaaatttcaaattgcaagccatttccaccattacattaacgacaaggatcgattcgcgtcttgcgaaattatcagagatcgtactggtcgggtttaaaggggaacaatcattttttcccgattatgaagtccgctctcgcctccctctgcaagtcctctcccgcatcatgctggactcatatgtcatccgcaccgctcatagctgaaaacctttacacaacctgtaaacatcccccctttcatctgtgacataatgtctgtgaagccacatataaaggggggatacagcatgatctatacatgcacgatgaacaccgcagtcgacttattcgttgaaaccgacgagctgcttcccgatgttgtcaaccgtactaaagatgaagattatcagccaaacggaaaaggcgtcaatatttcatttatgctcaagcgccttggtcttgacaataccgcgcttggctttacaggcggattcaccgggcgttttattgaaaatgaactgctgaatgaaaaaatcgtcacagactttgtcgaagtggaaggcatctcacggatcaatatttttatcaattcaacccgggaattcaagattgtaaacaaaggaccgctcatatctgaagcccgaaaacaggagctgatcaacaaaatccgtcaaatcccgccgggccgcttcttatttatttcaggcagtcttccgagaggagtccctgatgacatgtacctttcgctttccgagattgccgccgaaaacaaactgaaattgatcttggatatcagttctcccgtcctattagattgtctttcataccatccttacctgattaagccgaatgaacaggagcttgccgcatttttcagccggaagaaagcgctgtccgaagaagaaatcatccattgcggaaaggaacttctcgaccgcggcgctgaaagggttctcatctcccgcggcaaagacggagccctttatttggaccgccaaagaacattaaaagcgaccgccgctaaaggcaaagttgtcaatacagcatgtgccggcgatgccatgcttgccgtattcgtcggaaaacaggagctcggctgttccgttcctgaagcactcaggcacgcctctgccgccggttccttgacggcattctcgaaaggactcggtgatgtgtccaaactcgatcaaacagcttcacaaattcaaatcactcatttataaagggggttttcttatgaaaaagttcaaaatcatcgcggcaaccggctgtccaacagggattgcccatacatttatggctgaagaggccttaaaacaggctgccgccaaactgggtgtggaaatcaaagtcgaaacacacgggcaaatcggcgttcaaaacgaactatcgccagaggacattaaacaagccgacggggtcattgtcgcggcagacaaagatgtaggcgcagagcgttttgcaggcaaacgtgtccttgacgtcccggttgcgcggggcatccgggatgcggaatctttaattcggacgctgatgaacggcgaagcgccgatttaccgcggacaaactgcggcaaaaacagaggatgaaccaaaaacaggcgaatccgcttccatcggccgtaaaatatataaacatttgatgaacggggtttcccacatgctcccatttgtcgtcggcggaggggttttgattgcactttcctttttattcggcatccattcagcggatcctgaacatccaagctacaacgcttttgccgaattgctgaataaaacgggcgcattcggattccagctgatggttccgattttatccgcctatatcgccgattcaatggcaaaacgccccggcctgattgtcggttttatcggcggcatgatcgccagcacgggcggagcgggttttctgggcggcatcgtatccggttttttggcgggactgatcatttacggcctctcgcatgcacttaaaaaaatgcctcagtcacttgaaggactaaaagcaatttttctttatccggttatcggcatttttctgatcggtgcggtcatgtttttcctcgtcgaaccgatgacggccattaatgaggggatgaagggctttttagccgactttcaaggggcgaacccaatcattctcggcttgatcatcggctgtatgagcgcatttgacatgggcggcccggtcaataaagccgcttatgtcaccggtactgctcttctcgctgaagggaaccaatatttcatggcaggcgtctccgccgcgtgcatcacaccgccgctcgttattgcgtttgccacattgcttttccgcaaatatttcagccagcaggaccgaaatgcaggacttgtcaattttattctcggcgccactcatattactgaaggcgctatcccgttcgccgcaaagaaaccaatccctgtcattccgattttgatgatcggctcttcggtttcggcaatattaacatattcattcgcagttcaagtacctgccccgcacggcggattccttgtacttcccgttgtaacaggagcctttcaatgggtgctgtcgattatcatcggatcgcttatcggcgccttcttatacggcttttaccaaaaacggacatatgaaaaagagaaaggctgatcaaacatgaaaacagcagctttaatcaaaaaagagcacatctatctacaagaaacgctatcttcccaagcggaagcttttgaccggctggctcagatcgcatatgaatcaggagcagccaaaacaaaacaagcggtcattgacggattggcgcaaagagaggctgaaagcacgaccggctttatcgacggcttcgccattccccatgcaaaactgaaggacatcacagaagcaactgtcatcatcattcaaaacaaggcaggaatcgaatggaacgcgcttgatcagacgcctgtcacgttcatcattgcattattgatacccgatgccgaggcaggcagcacacatctcaatctattatcatcggtgtctcgcatgcttgttcacgaagatgcgaggcagcagctgcttgaagcctcgagtcctgacgacattctgagcaccttctcaagctatttatcttaattttgatcagaaagaaggaatcgatatgctgacaaatacgaaaaaaatgctgctggacgcacaggcaaacggctatgcggtgccggcctttaacattcataaccttgaaaccgtgcaggccgtgacagaagcggctgaagccttaaggtcccccgtgattcttgcggctactccaggaaccttcagctatgcagggcgcgactatattcaagccattgcagaaacggccgcggcgcgctgctcgatcccggtcgccctccatctagatcatcatgaagaaattgatgatattcgcgagtctttatcattggggacgaaatctgtcatgattgatgcttcgcaccatccatttgccgagaataccgcaattacggcgagtgtcgttcaatatgcccggcaaaaagatgccactgtagaagccgagcttggaaggctcggcggacaggaagacgatttgatcgtggatgaagccgacgcttattataccgatccggatgcagcaaaagagttcgtcgagaaaaccggaatcgattcgctggcggtggcaatcggtacagcccacggtctttactcaaaagagcccaatatcgattttgagaggctggccgcgattcaaaaacgggtttcagtcccgctcgtcctgcacggcgcctcaggaatttcagagcaagatgttagaaagtgcatcaagctaggctgtgcaaaagtaaatatcgcgactgaattaaaaattcctttttcagataaactgcgccgatatttgcatgaacacgccgatgcaagcgatccaagaaaatatatggcccccgccaaagaagccatgaaaaaaatcgtccaagaaaagattttgatgtgcatgagcaatgacagatactaatacaaaaagccggatgttctttaacatccggctttctcagcaattcatttgacatgctcttctaaagcatgaccgtcatggggcttttcatcgggtatcggttcccgaccggccaatatgctgtatacaagcatgacaattcctacataaacaaccgctgaaaccgtccaaacgagcactgtcttatccttcaagacggattcctccaatcaagcttcaccttttgcagcctgagtgcattcagaacgactgagaccgaactgaacgccatcgcggcacctgcgatccacggagccaaaagcccgacagccgcgaacggaatgccgatgctgttgtaggcaaacgcccagaaaagattttgtttaatgtttttgatggtcaatctgctcatgaggatcgcatcggcgatgctgtttaaatcgccgcggatcaaggtgacgtcggcggcttccatggcgacgtcagtccctgttccgatcgccatacctgtatcggccgccgccaatgccggcgcatcgttgatgccgtcgccgaccatcgcgacttttttgccttttgcctggattttcttcacctcatccgcttttccttccggcagaacttcggcgatgacgtggtgaatgccggcttcagcagcaatcgcttctgccgtccgccgattgtccccggtgatcatgacgacttccagccccatatcatgcagccttttcaccgctgccttcgacgtgtctttaatcgtatcggcgacggcgatcagcccggcaaaccgaccgtcgacggcggcaagcatcgccgtctttccttgtgtttcgagctcttccatttcgccgttcgcatcttgaatgtcaatatcacggttttccatcagacgtcttgtaccgatcaaaatccgcttttcattgactgcggcttcgataccatagccgggtatcgcttcaaagctgtctgctgaggcgggttctatccctttctctttgatgccttcgacaatggcttcagcaagcgggtgttcagagcttttttctgcagcaccgataagcttgagaaacgatgtttcatcgatccatggttcagggcgcacatctgtcagctgaggcttcccatttgtgaccgtccccgtcttgtcaagcacgatcgtctccaagcggtgagccgtctccaaatgttcgccgcctttgaataagattccgaattcagccgcgcggccagatccggccatgatcgatgtcggcgttgccaagccgagcgcacacggacatgcgatcacaagcaccgcaatcagcttctccagcgccgtgccgaattcgccggggctgaccgccaaataccagatgaaaaatgtgatggccgcgatcgccacgacaatcggcacaaaaaccccggaaatccggtctgcgagccgttgaatcggcgcctttgaaccttgcgcctcttccacaacttttataatctgcgccagcgcagtatctttgcctactttttctgctctgacttttaaaaatccatttttattgattgtagcgccgataaccggatctccaaccgttttgtcaacagggatgctttcaccggtgatcatcgattcatccagcgctgaacgaccttcgacaatctccccgtctgccggtactttttcaccgggcttcacatacatgatgtcgcctgccaaaacgttttcaatcggcacggtcatctcttcgccgttcctgacgacggtcgctgtctttgcctgcagccccatcagctttttgatcgcttcggatgaacgccctttcgctttcgcttcaaacagctttcctaaaatgatcaaagttaagaggatggcgcttgtttcatagtaaaggccgtccggatgccggtttgtaccgaggctttcaatgcttaaatacaagctgtagaaataggcggcagacgtgccgagagcgaccagcacatccatgttggcacttttgttccgcagcgctttataagccccagtgtaaaactgcttcccgacgataaactgaaccggtgtggccaacgcgaactgaacccagggatccatgaacatccccggcagccatataaatgacgtgaatttgaaatggctgaccattgcccagagcagcggaaaagacaaaatggctgaaaaaataaatttgccggtttgacgctgaatatctttttctctttgttccgcccgaccgtccgcagttcggtcttttttcagctcgagcttgtagccgagcttttcaacggcttcgatcatctcctccggcgaaaccgcgccagcatgatagtcgactgtcgcagtctcaatggcaaagttgacggcggcgcttttgacgccagacagcttgttgaggcgcttttcaacccggttggcgcaagccgcacacgtcatgccggaaaccgcaaattcggctttttccgcaggaacttgatagccgagcgattcgactttctcagccagctgtccgacttcgatttgccccggatcataaacgatttttgatttttccagcgccaagttcacatttgcgtcctgaacgccgtcaagccttttcaaccctttctcgatccgcgccgcacaggcggcgcaggtcatgccagagatttggagggtggcttctttttgtccgtccatatccttcactccttatataccccttgtaggtatacatcagcctgcaacatcatacccctggtcttcgatcgtatcgatgatctccttcagcgagactttgcctgaatcaaacgatacttcgactttgccctcgtttaaattcactttgacagactccactccgccaagctttccgacgtttccttctactgcctgaacacagtggttgcaagacatgccttcgactttcagtgttttttgttccatattgaaaacctcctgtggtttgatgatattgatcggttttatattaccatacccctgtagggtatttcaagaaaacgattttctcttttttcgttcatgattttgaaaaccgtttaaacacatcaagcagttcctcgatggcttcttctccctcaccgcttttaatcgcgtttgcgacgcaatggtgggtatgatcctcaagcaggctgaaagcaaccttttgcatcgcggcttgcacagctgagatttgaacgagaatatcgacgcagtagcggtcattttcaatcatcttttgaatgcctctgacctgtccttcaatccgctttaagcggtttgtgatttgttcttttcctttagagcttttgggatttaacgcgtgttcatgatgatctgccatcggaacacctctctttcctttatattttgtccaagatccccattggtaccattataaaatgcgaagcggaacatgtctaaaaaaagagacaaccccgaactgctgcggggtcatccctgcatattatttgtttaacgctttaaaaaattctctcataaactccggcagattggaccagtcatgacctgagaccaggttggcgtccacatgaagcttctcctcgacataagtcgcgcccgcggcttcgacttccggtttgcaggcgatgtaagccgtcagctcccggcctttcagatgttctctcaggcttgtgaaaatcaggctcgcatgacaaatcgcgccgaccggtttattttcctcaaagaaatgagcaacgattttcagcagggaatcgtacatccggataaattccggtgcgcgtccgccaggaatgatgatgccgtcgtattcggacgggtcaatctcatcaaatgaagcatgcgcgtcaattaaatagcccggcttttcggtgtatgtatcccaatccaggaagtcatgaacaaccgtatgaatctttttctttttcggtgcggcaatcgtcgtttcatagccctcttcaagacagcggtaataagggtaatacacttccagcgcttcaactgcatcgcccgttacgattaaaatctttttcgccatcaaaaacatctcctttccttttttactcttctattttatcccatttgcgcctgtttttaaaatcaagtgcttgagaagttttgtttcagccgacgatcgtgatgttctctgttatgtctttcaagcgggcaagatttgctttgtcaattcctgaatctgtgatgaccctgtatcggtcatgaaggcggtcgatttgcgagaaagcacgggttccgaatttgctgctgtccgccatcaaaatcgtttcgtccgcaatttcgatcattcgttttttcaacagcgcctgcatttcgtttgaatcgctcaagccgctcgcagggtcgacgcctttgcaagacagaaatgttttgttgacgtgatacatgtcaagggagcgctcagccaaagggccgacatatgacatcgattgcggcagcagcatcccgccggttgaaatgaccgtcaccttttcttttttgctgagttcaatcgcgactctgactgaattcgtaatgacggtcagcgggatgttttcaagcgcttttgccatgtaccatgccgtcgtgcttgcatcaagaataatccgttccccgcttttcacatgcttgacggcttcaaatgcaatcatctttttttcgtttacgtttgtaatttcgcgctcgcgaaaatgcacctctctttcttcagtctgcacgctgactgcgccgccatggcttcttttcagcttattttccttctcaagcttttccaaatcgcgcctgatcgtttcttccgtgacggaaaaaagctcgctcagttctgtgacgcgtacgctcgagcgcagattgacaagctcgacgattttttggtgtctttcagctacaagcatccgtttacttccttccttttttggtaaaagtcactgttacattcatgatagcgcatcggctccgatacaggaaaggttttcagcgggaagcggcgccgagaatctgacttgtatagcggcggtatgcccgctcccacgcttctgtatcttccggtacatacgttttttgaggaaaggaagccttgatcgctttccgggcgctctgaatatcccaaaacatgtcgagcgcgacggcctgtacggcaatgttgccgatggcgcttgcctctgacggtccagcccatacatttctggacagtacattcgccgtgtattggcagagcagttcatttcgaatccctccgcccgccatgtgaagtccgtcatattcttttcctgtcaaggtttcaatccgttcaaaggtgaaccggtatttaaacgcaaggctttccagcacgcagcggatgatctgtccgggcgtttccggcacgtgctgccctgctgcacggcagtactctctgatcgcctcaggcatatggacgggattgagaaacaccgggtcatccgggtcaaccgccgacctgaatgcttctgactgtccggcaagtttgacaagctcggcgctcgaatagctgatcccatctttttcccaatccgcctgacagcgctggaacagccacaatcccataatgttttttaaaaaacggaatgtgccgccggcaccgccctcatttgtaaaattccaatcgagcgcctgttttgtcatcagcggagcgtcaagttcggttccgatcagcgaccaggtgccgcaaatcaaatatgcaaagtcatccgtttcagcggggatgccgacaactgcagaagccgtgtcatgttcgccgacggcaatcaccggtacggcgggcacagacaattcgccgcacactgattgcgacagcctccccgcttcgcttccgggctttgctatatcttttggaaaaatcttggccgggatccccagaaggctgatgagctcccaatcccagtcagacgttttcgggttgaacagctgggttgtcgtcgcatttgtaaattcgctttttttctcgcccgttaaaaaatagcgcagcaaatcaggaatcattaatagtgtgtccgcgtaatccaacagcggagaattcgcttttttcagcgcccggagctgaaagatggtgttgaacggcaaaagctgaataccggttctggaaaacagctcttcttttccgatttcattcaacacctccgtcattattccgtccgtgtaagggtcgcggtaatgataagggttccccatcagctctccgttccgatcgagaaaaccgacgtcaaccgcccatgaatcgattccgatgcagctgattcgtccacagccgtttttcgcctttaaaatgccctgtttaatttcatgataaagcctgagaatgtcccaataaaggtgttttcccgcctgaacgggctgatttggaaaacggtgaatttcctccgctttgatcagaccgccgtccacatgacctgcataagctctgccgctcgacgcaccaagatcaaaggcgagaatcgtcaccagcttgcaccgcctttcccgcgtgccaggattttttccgcatatccgctttccgcataagccttgagcggatcaggcggaacgttcatttcctcccgcacggcgcagaggagcggcttgacgtcgatttcaaatgcctcgcggatcgcagcctctgcggcaagcacgtcatgatcttcctgcgctttcttcacttcatcgaagttgatcaaaagcgcttttgcaaattgagtctgcacattcatgaccgagcgcagcacagcgggtattttcggttcaagattatggcattgatcaagcatatacgaaatatgttcggccgtcttccggacgttcgggtcagaatcacggcaggcgtccaaaatttgagaaaaaatgagaaacagttcgtacgggttgtgagcgcccgcgatcaaatcgtcatcagcgtatttgcggctgttgaaatgaaagcctccgagacgtttttcgtcaagcaaataagcgacaatgtgctcgatgttcgtcccctgggcatggtggccggtgtcgacgagcacctcagccttcgggccgagcttttgcgccaaattgtaagccatgccccaatccgccagatcggtatgataaaaagccggctcaaaaaatttgtattcaatcaagagccgcatatcatcgtcaagagcttcgtaaacttcagccagacactcatacatccagtttttccgttttctgatgtcgccctgaccgggatagttggttccgtcggcaagccagaggctgatttccttggagcctgtttgttttgcaatatcgacgcattcgagcaattgctcagtcgctttttggcgaatggccgctttcacgtttgtgacgctgccgaatttgtagtcatcgtcctggaacaagttcggattcacggcgccgatagcaaggccaagctgctcggcgtgcgctttcagctttccgtaatcatcaactcgatcccaaggaatatggatggcgacggaaggacaaattccggttaatttgtgaacgactgatgcatcttccattttttcaaacggatctcttggcacaccctcttgctgaaacactttgaagcgcgtgcccgagtccccgtatccccatgaaggcgtctcgattttaagcgctttcaatttttcctttgcttcagaaaggctgattcccctgtctttctgctgttcttcaaataaagcgtaggcccggtcattcatcatgtacgcccatcccccttgtttttaacggatatgccatggttgacattaacgcaagttccggctgggtcgtgtccagccggctgtactggacgatcacaggtacatcgcttgcgatctcgatcgcataaggaacattttcaggaatgcgttctcctgatcggtgcaaagaacttgtgcggatatgcttcgttctcttgccatgaaccgtctcggaaatgccttcgagcggcggacggtcttcgaagtatacggtgatcgcaaggtttgcgttttcttcatggcaatttaaaacacaaatggcttcatggctcgtcaagcttccggaactttccggaggaataaaaccgtccggtatgatccaatgggtctcgcccttcatctcccttttccccctttgtattctgaaagggcggccgaagccgctccttatcaattaccttgaaaatgcggccggcactcccccgtcaaccgtcagcatgcatcccgtcgtttttgccgttttttctgaagcgaaataagcgatcgcctcggcaatgtcggcgggataaatgttgacggaaagagccgtacgtttgcggtaatgctcttcaagccggtcgggttcaatcccgtaggcggcggctctttcttcgcgccatttggagtcccagatggccgacccttgaagcaccgcatccggaagaactgaattcgcacggattccgtacggtccgccttcagccgcgatgcatctcgccaaatgaacctcaagcgcttttgcagagctgtatgctgatgcgtttttgcctgcataaacggaatttttcgaaccgacaaacaccatgctgccgcctgaaccttgttttttcatttgcttaaaagcttctctggccacgaggaaatatcctgttccgagtacattcatattcaggttccattcttcgagcgtcgtttcatcaagcgggcttgatgtcgcaaggcccgcattgttgacaaggatgtcaatcccgccgtatttgagggcgatttcctcgaaggccgtctgaacctcctcttctttcgtcacatccatgcggacggcgtaagctcgttctgcaccgtattgatcattaatctcggccgctgttttttctgcgccttcaatattaatgtcagcgaccacaacatgcgcgccttctagagcaaggcggcggcaggcctcgctgccgattccgcccgctccccccgtcacaaatgcgatcttgcgcgaaaattcggcttccggcggagcaagcgttaatttataaagctcaagcggccaatattcaacattgtaggattcttcctcattgagagatacaaagtttccaaggacttccgttcccttcatgacggcaatcgcccggcggtataaatctcggctgaccttcgccatcgccaggcttttccctgctgtcaccatgccgattcccgggatcagcatcacgcgaggcgccggttcaaacatctcgtctccttcgtgccggtttcgttgaaaataggcggcatacgactctttaaatccagcaatctcggttttgatccggtcgaccagcgcttctgtgtcctgttcagcgggattccacggaatataggcaggcacccgctttgtatgaacgaggtgatccggacaagcggcgccgacctgtgaaagcgacggtgcgcgcctgctgttcgcgaattcgagcacatcgtcagcatcgcaccaggtgacgagcatgcgtttttccccgctgacagcgccgcggatgaccggcaagatatcggctaaaatccgtttccgctcctccggtgcaagcggctcgaccatctgtccgccaaacggctgatgatcttccgaacggcttttaatatatgcttccgcttcgcgaatcacggcaatcgtctgatcatagctttctttcgacgtttccccccaagtgacgagcccgtgcttctccattaaaacaagctctgcattcgggttgtttttcacaccttctgctatcatcttcgataaagcaaagcccggtctgacataaggcacccatacaaatcggctgccgtatatctcctctgcgatctcttttccattatcgcagcagcagatgctgatgattgcatcggggtgggtgtgatcgacatgcggaaacggcaaaaaagcatgaagaagcgtttcgatcgacggccgcggatgctttccgtccatcatgcaatgggacaaatatgccgtcatttcttcatcggtcatgctgctccgttccatcagcggacgaatatcatccagcctcagtccggtaaattggcccgctgacatcgtcgccaagtccgagccgctgcctttcacccacatcacctcgatgtccctgcctctgaaatccttttctgtcgttttcatcgatgtgtttcccccgccccagttgcagaccgaacggtcagcgccgatcagattggaacggtagacgagctcggcaagacccggacgcagcgatgcagcctcagactctgaccataaatatttcaccatgcgtatcactccgtttttgtttgtttatttttgaatatgtttgttttaagagtaacatattttgattttctttgtaagcgcttttttccgaaaccattttaggacagaatctcttcaatcagtcgataaataaaaaacgccaacagcaggcggccgtcggggttaagaatgtaggaatgtttaatctttgattttaaaataaaatgtcaggttttaagaaagcgctggcatcttgttgccggcgctttttgtgccgctgacataccgtttgggggaacatattgatgcgcaaaaaacggttgaaattcgtcttttgatcttttaatatataaactcatgttttttaaaaggaggggtcaggatgaaaaaaacactgcacgctccagtcaaactgatcatcgcaatttttatgatttgtacattttccatcggctttacagagtacgtcgttatgggtatattgacttccatttcaaaggatctctctgttccgatttcgtctaccggcctattggtaacggcatatgcgggaagcgtctgtctgacggggccgatcgtcaccatattttcggtaaaaatgccgcgcaaaccggtattgatcggcttgatgagtgtgtttgtactgtcgaatgcgctcagtttcctggcgccgaacttcaccgttttgttggtctcaagaatcctatccgcatccattcatggtgcattttttgcaacgacaatggtgttcgtcagcgaaatggcaccgcccgaaaaacgggccgccgctgccgcttcaatgaacggcggcttgaccatcgccctgatgctcggcgtcccgtttggttcttatttaggcgatcttttcaactggcggatcgtttttctgatgatcgcatgcctcggattgatcggcctcgccggcatttggctgacggtgccgcacagaaaaccgaaagttgtccctaaattgatccatgaatgggatgtgtttaaaaataaacaagtccttttttcttttgctatcacgatctttggctattcgggcgtattcatcgcctacacgtttattgaaccgatgctgcggcattctgccggtttgggcagtctcggcattacagccgcccttttcgcctacgggtttggcggggtcgtcggcaatttctacgccggaaaggtgccgtttcacctgttaacccgctccatgatcggggtgatgatcgcgctcatggcgatccttgcggcctttccttttgtcagcggacatcctgccggcgccatcatcgtgacgtttttattcggagccggcgcgttcggaacggtgccccttttgcaaacaaaggtcgtggctgcgtctgaacacggaacaacgatcgccacctccgtcagcatcgctgcatttaacttggccaacgcgctcggggcttggatcggcggactcattcttaatgcatcagagtcctacacataccttgccacaggcggtgcgcttatgaccatgtgcgggctgacgcttacgatgttcgcctatatgtctgagaaaagacaagtgaaagaagacatgtggggaacggacctgtaatcaaaaagctgcccggcttaagacctggcagcttttttgtttggttcttgcagcgtctttgtgtgagctgctttccgcatgaccgcggtcatcaaaagggcggctgcggcataaacgataccgaaacagccgaaaacgaaaacagaagatgacatccccaataacatgcctgatataacaggaccgcaggccattcccgtatacctgataaaattaaacatgcccatcgcactgccgcggttctcctcaaattcattcgccatcatcgtagagaagagcggcggaatcagccccatcgtaacgccgaaaagaaccagagccgccgacatggcgaaaagcgaaaacaaatgggaaaaggcaaaacagacgacgctccctgcggcggtcagattgccgatcaaaaacaggcgtctgagcgataatctcttttgtatccacttaaacagcacgctgccggcaatcgtgctgaccgctatcggcaaatacagcaagccgacgatctgcagatcaaggtgatagtgatcggtcagcaaaatcggcaaatacacgatcattgaaaaataaataaagaaaataaggtagcttaatattaaaacggcattgcccgccctgtttttgaatatgtccttataatgcgacagcaggctgcccgcgctgagattggtctttttctccgaatggctgcgcggaaagcaaaacaaattgccgaaaagcaaaagaacagacaatactgtcaaaaaccaaaaaatacccggataattatagcgctccccgataaaaccgccgagaataggcgccgctgccggtgcaagggaaagcagcatttgataagttcccatcgcactgccccgcttcgttcccttaaacagagatccgattgtggttgccgcaattaatggaagcgcagcagtccccaaagcctgcagcaccctgaaaaaaagaaacaggccaaagtcccgggaggctgcgcagccgattgtggcgatgaccgttacgatcatgctcgccatcattacaaatctcgctcctttaaaatcaacaatcgagccgacaatgatctgcatcgcagctgtaatgaagatgaacagcgagacggacaggtttaccatcgaaacagaaacgtgaaacgagtctctgattaaaggaatgataggtgaataaatattttgattcaacgatgcgaaaaaagcgctgatacacacaaaatacataatgaaagaagcatttgatttcattggtctcatttcaaaccgcctgccttgtttttgtttattcgttaacaatttatctaatatcgtttactggttaacaatattaattgtagatgacccctttatcattgtcaatgaacatttcttattgcagctttaaagttttttacatattttttacttatcgagttccttgactcaaaaagcgccttaaataaaggtttttatactttcaattctgattacaattcctcagattcacaaaaaaagttacgaatattttcatattttgaatttgaattgtgttgacagttggaaaagatagggataaaatgactattgtttactagtaaacttttatgctgtaacttgcctgattttgagtacaaacccttgccctgctttaacaattgaacaaatgccacaccccttcatcatgacccgcatcatcgctgtattcttctcgattcatcacgaagtgagaccagcctattcccagctcgataagccgcacgtatccatcattgattgcaaatgaagtcactctatgtccgttaaggaggaaatcaatgacagagcttataatggagagcaaacaccagctattcaaaaccgaaactcttacccaaaactgcaatgaaatattaaaacgcagacgccatgttctcgtcggcatcagcccgtttaacagccgattttccgaagattatattcatcggcttatcgcctgggccgtccgtgagtttcagagtgtatccgtgcttttggcgggaaaggaagctgccaaccttctcgaagcgctcggcaccccacatgggaaggccgaacggaaagtcaggaaagaagtctcgcggaaccggagattcgctgaaaaggcgttggaagcgcatggcggaaatcccgaggacatccataccttttccgatttcgcgaaccagaccgcataccggaatttgcggatggaagtcgaagctgcctttttcgaccagacgcattttcgcaatgcctgcctggagatgtcgcatgcggctatcctcggacgggcccggggcactcggatggatgtcgtggaagtcagcgcagacatgctggagctggctgttgaatacgtcatcgctgaacttccgtttttcatcgccgcccctgatattttaggcgtcgaagagacgcttcttgcttatcaccggccatggaagctcggcgaacagatctcccgtaatgaatttgccgtcaaaatgcggccgaatcaaggatatctcatggtttccgaagcggacgaaagggtggaatctaaaagcatgcaggaggaacgagtatgaatcaatcgctaaaaacattcagcgtgttgtcagaacaatatcacgaaaatccgtatcagtatttctcataccttcgggaatctgatcccgtccattatgaagaatcgctggacagctattttatcagccgctaccaggatgtgcgccgcgtgctccagaatcaggacgtctttacaacgaaatcgcttgccaaacgggccgagcccgtcatgcgcggacctgtgctcgcccaaatgaaaggcaaagagcacacggcaaaaaggagaatcgttctgcgccgctttatcggggaatcccttgatcacctcacaccgctcatcaaagaaaatgcacaaaggcttttggccccgcacgtggagaaagggcggatcgaccttgtcaatgatttcggcaaaacattcgccgtttgcgtgacgatggacattttaggtttggacaagaacgaccaccaaacggtgagaaactggcacagcggcgtcgccgatttcattaccagtttgaatcaggcgcctgaggaccgggagcattccctcaaatgcagtgaacagctcgctgagtatttgaatccgattatcgaggaaaggcgcaaaaatcccggacatgatttaatatccatcctttgcacttccgaatacgagggagtggcgatgtctgaccgggacatacgcgcgctgattctcaatatattgcttgccgccacagaaccggcggacaagacgctcgcattaatgatttatcatttgcttcatcatcccgatcagatgaatgatgtgctggaagaccgcacgcttctccctcaggcaatcgcagagacgctgcgctacaagccgccggtgcagctcatcccgcgccagctttcacaagacgcggagattggcggagtcgagctaaaagaagggacgactgtattttgcatgataggcgcggcaaatcgcgatcctgaagcgttcgaggatcccgacaagttcaacattcaccgcagcgacctggaagtcaaaagcgcattcagcggcgcagccaggcatctcgcattcggttcaggcgtccacaactgtgtaggagcggggtttgcgaagaccgaaatcgagcttgtcgcaaatatcgtccttgatcagctgaaaaatatccggctggaggaagacttcatttaccgcgagacagggctttacacacgcggacccgtctcgctcaacatccggtttgatgccaaacattaatcttgtgaaaaagccttctcctcccgggaggaggctttttcaattgctgcctcactgatcttcgccagctcttcaatacccttcgtaccttcgctcgcgtgtgaaagctcgtgacattgaacgattttaaaaccgttcattttaaaaatcgcgatgatatcaattctcccccggtctccattctttttgacaaccttgaccgtatatctgactgctgcgctttcgaggcgctcgtcaaacaaaaattcatgaaagggcgacaccgttatggtgcgtgcaacgtttttcagcgtccgtatgtgatctttaaactgcacaaggtcaatgtgactgccgtccgtgacttgaacataatcctcgctgaaataatcggcaattttttcagtattcatttccgacacgatgtcctgatacatgttgcttaaaaactgttgggcttcacttttattcattcgttgctcctcttgattaaatgtgttttgaccattcgtttaaaaagcggatgacggtttgcagctcggattcggaaaaccgatcaaacagctcgatgtagcgctgttttgcaatttcatgcatcctgtcatgaatgtcggccagttttttcccctcatcggttaatgtgtaatacaattctttgttgttgttcggttttttgtgcgattcgatcattccgtgctttgtgagcacattgaccgcttttgtcactgccgcttttgaaatttggagttttgctgccaggaaagcgttgttgacgtctgcttcgctttcgctgataagcgagataatgtgaagctgggtcagggtccaatgcttacgcatgctttcttcttcttgaaaggcttcctctgcgaacgcctgctgttcatgctgagcccgcttttctcttttgagaataaaatcctgaacggcttgaaatgcctgctcatacgtcttgttttccactgtcatcattccttttcacaatcattaaccggttaactattaaatagtttatcagttaacaataattaaagcaagcaaaaaaaagcatatgatgcagaaagatccgcagcatatgcttgccctcatacttgaggagatagcacgtgcttttcagtccaagccagaagcttcagatcctgtttgcagccggcgataaatgaaagccccaaaggctcgccgttttttgccggcaacgggacggtgatctgcggaagcccgccgagcccggcaatacacgtcagtttcatcgtgcgcgcccttctctcatttaattcgttttccggcagaccacggagcggcggcgggccgggggcagtcggaataacgagcaagccgtcttctccgagccattccgacagtctttttctcgccgcctctcttttcataaacgcttgcacatgatcgcttatcacaaggcttgacgcccattcaaacctttctgcgattccagggccgaacaccggatttgtgcgctcgatccaagctccgtgctcctcccaaatctccagtccctgcagcaccctgaacgtctccgcccattccgcgaggccgccgtcagcggcaacgcaccagtcgaattcgccgtcaatcaggcctaatgcataagcgtatacttgtgtccggtcgctttcttcaagcaggctccacgcctctttttcaaaataaacccggttgaaacatgcccctgcctcctcctgcccgctaagcaggacgcggcccgccgcatgaaggactccaatatcttttgacatccatccgacggtgtcaaaactctttgccagcggtatgacaccatcaaccgacacctcgccgtgcgtcggccgaaacccgaaaattccgcagtatgaagaagggattctgacagatcccccggtgtctgtcccgagagcgaaatcggtcatcccagaggctgccgccacagccgatccgcttgaagaccctcccggaattttgtccatggcacaaggattgacgggtgtaccataatggacattttctccgtcgaggctgtacatcagctcatctgtgtgcgcagcacccttaagccttgcaccttcccgcagcagcaagtcaacggcttccgcgtttttttcggcaggttcgtgcgtcctcagccaatcagggtttcccgccgcattagcatggccctctacagcaaacacatcctttaccgcaaacgaaagttttttcaagcttccttcagccgatggcggatcgaccatcagatcccggtttataaaagcgctccaatcatgctccattttcaaaatccctctatcaacttttgcttctaacgataaccggacgcctcttcaaaatgaacaaagttgtgacaaaatcttccgttccctaatttaaaaaggcctttaggtttgttcctgtaggcaaacagggtaaaataaaggggtgttgattacatattaaaaacaaacatgggagaggagaatgaaatggtggacaaggttcgcacagggatattaggatacggtttgtccggttcggtgtttcatgcgcctttattatcagtgttagaagattatgagattcgaaaggttatgacttcaaggaaagaacaagtcaaacaggacctccccgaagcagaagcggtcagtacgatcgaagacatcacaaaagatccggacattgatctcgtcatcgtgaccacgccgagcggccttcattacgaaatggcgaaagagtgcatccgcgccggaaagcatgtcgttcttgaaaagccgatgacagcaacagcggaagaagcggaagagctcattaatgccgcgaaagaaaaaggcgtgcttctcagcgtgtatcacaaccgaagatgggataacgactttttgacgatcaaacagctcatcaaagaggggcgccttggagaggtcaacacattccacgcctcctacgaccggttccggccgaatgtcagacagcgctggagagaacagaaaggaccggggtcaggtgcactgtacgatttaggttcacacttgatcgatcaggcgcttcatttattcggcatgccgaacggcgtcaccgctcaagtgaccgctcagagagccaatgcggaaacagacgattacttccatgtcatccttcactatgatcagcgccaagtgattctccactcgggctcgattgttccggccaacggcccccgctaccaaatccacggctcaaaaggaagctttattaaatacggaatcgacggccaggaggatgcactcagagcgggtcataaacctgcaggcgatgagtggggagccgatcaacccgaatattacggggaactggccacagtcgaaggcgacgagatcaggaaggaaaccgtggaaacgctcccgggttcatacttaacttattacaagcagcttgcttcaagtattctagaaggcggcagcctgcctgtcacggcggaagaaggacgcgacgtcatccgaatcatcgaagctgcgcaaaaaagcagcgaaacgaatcaaacggtgttcttaaacaaataaaacaaaaccgcggatatgatccgcggttttttcaaaaagtcctgcccaattctttggctcggacaatcgcattttgttttatttcttcagctttatcaggctcagcattatgcccttctataaataagccttcaaattccggaaccccgaaaaactgcatcatgatgctgatatagcggtgccccatctcaagttccgcagcctgcccttctgaatagtagccgcctctcgcctggatgtgcagcgcttttttatcggttaacagcccgatcggtccctgttcggtatatttaaacgtctttcccgctacagcgaccgcatcgaagtacgctttcatcaccggcggaaaagagaaattccaaagcggcgtgacaaacacgtatttgtctcccgcgataaattgctcgctcagctcattcaaacggccgactttagctttttcgtgttcagaaagctgttcaaagcccgaccccgactgcaattttccccagccgctgaaaacatccgcatcaatctgcggaatgttttcccgataaagatcaaggtgtatgacttcgtcatccggatgagcttctttgtaagattcgataaacgcttttcctgccgccatgctgtaggatgccctttcgtcatgcgggtgagcggtaatgtaaagggtttttgtcatttcttttgctacctgcctttttgtattgatattgcttagtatgggacgttttcaggcaaatattctggaaaagccggagctttcgcataaagtgcagatgctttttaatctgatgtccgataaggcttttgttcggcatcatgatcacctgctatattttcactctgctttcatttcagaataaaaaaggaacgccccgatttttcaggtcaaggcgttcctccattcaatccgaaagccgactcccttgcaggagcaaatgcaacttcgatttttatatgttacttttgtttacagcttttatgactgcgctgcatgttcctcttctttcagcttttcgagtctctcttgcacctcttcttctgaaaggccgtgctctttgacatacaggttgcgcggatgaacccggcactcgtgcgtgcagccccgcaaatagcggtgctcattttcttcagagcagatgatctgcttgttgcattccgggtttgcgcagttgacatagcgctcgcaaggctcgccggtgaaataatcttttccgacaatgacgtgctctttctgattgaccggaacgctgattctttcatcgaaaacatagcatttcccgtcccacagttcaccttgaacttcagggtcttttccgtacgttacaataccgccgtgaagctgggacacgtcttcaaatccttcttttttcagccatcctgaaaatttttcgcagcggattccgcccgtgcagtaagtcaatattttcttgccttcgagcttttctttgttatcgcggatccactcaggtaattcgcggaacgctttaatgtccggtctgatcgcgccgcggaagtgccccaaatcgtactcatagtcgttccgtgcgtcgacgacaatcgtatcttcctgctgcatcgcctcataaaattcttttggctccaggtattttcctgttaattcgttcggatcgatatcatcttccaggcggagcgtcaccagctcatcgcgatggcggacatgcatttttttgaaagcgtgcccttctgattcatcgattttaaataccatatcttcaaagcggggatcgcttttcatttcactcatatagcggtctgtctgctctatggttcctgacacggttccgtttattccttcacccgccacaaggatgcgccccttcagccccaaatctttgcagaacttgaggtgatcttcggcaaattgctcagggttatcgatatgaacatatttataatacaacaatactcggtattgattcttcatgatactttaccacctatctgatgcatgtttttataagataaaaaatggaatatccgtccatttatataatcaaaccttcattcatattaaaacaaaccatcaccatgatttcaatgaagcagcttgaacattccattaatcaaatgttagaaattttaacacttccggcggctttacgcaagcaaaacagctcagattaaaggactttcagcaattctgttataaactcccaaaaaccaggcacttcttggcataaaagcatctccgctttttcgcaaatcttcatcttcagctcctgttcaagatcctccctctcttgataggatgtgttgtttaatttgcttttgatcatcggtgtgaaattttccagcaatttctcaatctctttttcatcgtgcagactcactgttatcattcccctctgctttagaattcagcagctctcttatcttttcgagtgcccttttatgaatttttgaaatattttgccttgattctcccaaagagtcggcaatttcctgcatggataccccatgaatataaatttgtgcaagcacttttttctgcttgtccgtcaattgcaaaaacgcttcataaagcatcgggtcttgcaggtgttcgcttaattcctcttcctgttccaagacatcgtctaacagatcgcctcggggcggctcgggcagattcggactttcgtcgatcatcaatggaaaacgctctcggtttttccggactcttttatcaaagtcgacggagaaaatccggatcatcgagttgatgtatttgatcatgcggatgtttttgtaaaatcgcttaaattcacgatcgagacactctgcctcttcagaatccggatgttccaacacgtggttgaaaagccgctcataccttgggttgctcaaaaaatgcttcacaagcggatgccttgtgatctccttgattttcgcacgcagtaacgtttgatcaatcataaaaaccgcctcctatttatttagatgaaagaaatgaaaaaaaagtaaacacatctcttctattaacatgcaaacataagttcccattcagagaaaatagttctttgcttacatttttcaaactttcgtcacttcttaacataggaggtggtaagaatggacagcgcattcattgaggaagcagcgaaacaaatcggcaatgtcggctttccagctgtattggcaatttacttgctcactcgttttgaaaagaaaatcgatgaactgatcgagctgatcaaagaaaaaaatgaaaccgatgattgacatcggcctcacttttttcacttaacatgacagaaggggaaaacgaaaggcctttcagctctcctttacatttttagaaagaggggatatcacatggaaaaaaacaaacaaattccacagccgatcagaggagaaaaaggagcggaaacgaaaattccgcacaacgttgagcgcgaccgccaaaacccggacatgctcgtaccgcctgaaaccgaccacggaacggtgccaaacatgaaattttcattttccgatgtccataaccgtcttgaaaaaggcggatatgcacgggaagtcacagttcgcgagctgccgatttcagacaagcttgcttctgtcaacatgaggctgaaacctggggccatcagggagctgcactggcataaggaagccgaatgggcgtatatgctgtacggaaaagcacggattacgtctgttgaccaagacggcagaaactttattgaagatgtgaaagaaggagatctctggtacttcccgtcaggtctgccgcattcaattcaagcacttgaagacggatgcgaattcctgcttgtcttcgatgacggctccttctctgaaaacagcaccttccaggtgacagattggctggcccatacgcctgatgaggtgattgccgcaaacttcggcatttcaaaagacgtcgtcgcctctcttccagttgaagaaaagtatattttccaagaagcgatccctggctgtcttgagaaagacaaagttgaaagcccgaacggaacggtacctctatctttcagctacaatttgcttgaacaggaaccgattgtatccagcggaggaaaagtatggattgccgattccacgaacttcaaagcatcgaaaacgatcgcttctgcgttagtggaagtcgaacctggaggcatccgggagctgcactggcatccgaatacagacgaatggcagtattacatttccggacaagcgaaaatgacggttttcgctgccgacgggcatgccagaacatttaattaccaggccggagatgtcggctatgtgccgttcgcaatgggacactacgtccaaaatacaggagatgagccgcttcggttcctcgaaattttcaaagacgaccactatgctgacgtttcgttaaaccaatggctcgcgcttgttccggaagagcttgtccgccagcaccttgacgtcggcagcgaatttacaaaaatgctctctaaagaaaagcatccggtcgtcaaatttgataagaaataaccagccaggcttgcaggagacatatcctgcaggcctttggcgcttgtgtacatattttaaaggagttgtgtcatgaaacatttcattatttgctgcatatcggttatattcgtttttttcgcccactttctcggcatttcgatcctgtttcatctgtcgggcgcgttttaccaaacagtcggatcattgctgctgtttacgctttgttataccggactgacctttgtcctggaaccggctgaaaaggtgctcatccacagtatgaaactgctgggcatcaatcggcggatcacggtttttgccgctgaaatgatcacgatcggatgtttatgggccgccatttataccgcggacgaattgctggacgacgttctgctgacaacctcggcggaaatcatgattgccgtttcgttttttacaattgataaaatcctttatccgcggcagaggtccggttcgctcttatattgacgatccattttaaaccgaattttttcattgcaggactcaatgattcgcaacaatgttatatactggatttgcagtgattaaaaggaggttttgttcatgaataaggttcttttcagacccggcatgtcgatcaaagaaattggcgaacagttgcaaggctatatcgccgcaaattggaaacaaacgcttgacgatcatcgcgaagctcttttaaaggtgtttcccgaattggaagacgcgacttacggggtctacctggaccacctgctgcctcctgtatttgaaagtctcgaacagtccggctttacaacgattcaaaatgcgggaaaaggcgatttttttatcggaaagggcttgaactttagacagtccatggaaaaatggggagctgacaactgccgctcacgtgtgttttgggttgtcatctccgatcagcaaaaacagccggccgggacgctgctctttgacttttatcactctcacaccggatttgatgtccccctctccccgcggatttacacgttggaagaaacggagagagaccgaattgttgctcacataaaacagataaaggagaactagcttatttcgacccacaaagtcataagctgcagccgctgggtattccagcggtttttttatttacactaaatgcagccaaggaatttttgcaaccaatcaaaccacacattcgtttatgtataagaccaatatcttacataagggagaaactcatgagaactttcgaagtgttgacactcctgtcttttgtcatgctgtttcagcaaaaaatgccgggaaagcttgcggcggcagccggatttgtgagtattggcgtgttggcggacttgcagctttattcaaaacttttgaagcagctcggcatgacgggcgacatcgacggcgaacgaagcgcggatatcgtgaaccggtacgttttggatttttcaacaagcatttaaaagaaaccggtggtaatcttgtacctgccaacaaaactggtatgtaccaaggtcgtcaggttactgtaacagagcacgtccttggaggatatagaaaaggcgggaaatccaacagcccatatacaagttttacaataaatcaaaaggttgcaaagggctacggtaaaaatacaatagaactcgacatatctgctctccgtaaagccatcaggtctggtgaagtgaaggatattgtaattttatctcctaaacaaatcgaaaggttaatcaaaaatgatactcgccagtctgaacactggaaaaacaaagctttaaaatggactcaaagggacactgaatactttgtaaaaggtgaggttccaaaacaatttatcaaactacatccgaaggagtgatagatatgcttctatattataaaaatgaatgcttgggtgaaataaaaggcgctactgttgaaggtgtctggatgtatggaacaatcattcctaatgaaaacatggaaaagttcaaagatttctttaaggctgtagtaaacgaggatgacccttttgccattgaacagtatagtgaagaatggttagatgatgaaaattggtttattattgatgaaaagcaaaaaaaggtaggtatatcccttccagggatttacgaaaatgataatgaaataaattggagatggagataaaaaggcccctttttagaggccttttttttattacttcagtaaggattcgagttttgctttcgttttcggtccgtaaataccgtcggcagaaagcccgtgcataagctggaaccgtttgaccgcgttcgccgttttcggcccgtaatagccatctatgccgttattcttcgcccctttgtctggatagaaatagagggcagctaaagcctcctgaatctgccggacgaccgtccctttcatcagtgggctttttaccttatagatgccagaccgcagcgtgcaggatgattttttgccgcttgaagaaggctttttctattccgctgcaagagcttgcaatatgggaacgtccttgaattattatgccagtaaccaaacgtttttctcatgatatgaggaccgatgacccgacatattccgcagtatcattcatatgttcattaagcgattccccgctcttgcacaaacaacaaaaactccccaaaaaacaaaaaaaccaccatcatatgtatggtggagacggtgggagtcggatagataagttttacatcggtttagtaataagcgaaaaggctttgtatcaagggttttatgtttatcagttttccttggataagtataaaattataatgcgatcttgccattttcttgccacgaaaaagtagtgataagaggatgacctaacagaccatgaggtcatccacttttaataaaaagaaaaaaggacgagggaaaatgagtatcaacaaaatcagatcagcactgtataagtcagctaaaattttaggagatgttaacgcggcgaaaaatggaacgctagggaaacgaatggcccgccgagctgcaggaaaaacagccggcaaaatattgggcaagctgttcaagtaaaactatgtagaaaatccccctcatttgttttaaaatgtaaatgttcattataaaacaatgagggcttttttcacatgaaagcttggacatggaggggatatttcttagaatgtattgagaatttgttgttattattgagattaaaattaaggagagaataaagttgaaacgaacagcagagtttaccttatcattaattgcaacaatctttttaacaattggttggtttttcacagctattttcacatttttttatggttttacaccagcagatgaagctgacatgggatttttctattacttattaatttatacttatttatcaattccacttcttgtgcttatttgggttgcaacatttaaagtcaaagcaaacagcaaaggctggggaattttcattctaattatgggtgtcctttataccttttctatttactttgtgtcaggcattctcttgttaattgccggtattatgatggtcgcaaaacaaaataataatagtagtaatgttatgtctgcctaaattacataaaaacaacaaagccaccaatcgttaaatggtggctttttctttatacaaaatatgcaatgttctcggcttaccttcttcccaatcaacaagcccctttttacgcaaccggtcaagatgaccttttgttgtacttgaagattttaaaccaaccctttcacctatttccctaacagatggcgggaaacctttttctttagttagttcgtctatggcttctaatatttgttcggattttttcatagtatccccctccattggtttgttttacctatgacaattataccaaacattcgttctttttcctacaggaagagaacgtatttttgcatgcagagcattattgaccagcttcaagttcctgtttttaaaatgtatcttttttactatttttcaatattcagaggcattaccactcattttatggtaatctatacaataccaaatacattataagggagagagaaaagtggagacgatagctaaaagagtctgtaaaccatttatcctattgctaacagctgtcttattagtaacctttgttgtacctcaaatttcacaggcaagcgaattttcgaattcccaggtgaaaagctattccgattctggtgattattcagaaaaggaattagaggaaatattaaagttttacttcgaagaagttggggaactaactaatgagggatatgttattaaaaacaaggaattgtttgataaaaaagttttggagggcgaccctgctgccttgaaactaaaagaattaatggcgtcagactcttcttttcagaagtctagttttcaggttgctagtgcaacatcttttggtaaatgtgttgtaaacaaaatgattggtagttatggaaatatagcgcgtcaatttttaaatggtgctatctttacatatatcaaaactaagcagtatgatttagccgcaagattaatgttcaaaactttgattaaatctgggatgaaagttaatgcagcgtctcttgcaatagagttgggatactatggatggaaatgtcgagggaagtggtaaaaatgtctccattaacaatagttgaagtcatcttagcgttaaccgttttaggtttatttgcatggacatttaaaagtaaaaaaagtgctgatgacgatgatgtgtatagatatgcaaggtacatgatttatttacttgtagctgaagttgcgatatacgtcatattcagtttcatttaaaaaacccccatttgggggtttttattgtgcataaaagaattttgaatatcgccaaaaaattttctttactttaacagagattcaagtttcgcctttgtcttcggtccgtaaattccgtcagcaggcagcccgtgtatgagctggaaccgtttgaccgcaataaagtcgcggaccggaaaccggagagatcgttcaaatagagggccaaatccactacataaaccagctgcagaaaactttccatgtcatggattctaaaggagacacgaatctttttaaatttgaggatattgttggcgtggaaatgaaataagcccttctcacaactggaagggctttactcatcatatgggcggtattttttccggccagcttcaagttctttcttttgagtctccacatgatcacggagaaacaagctaactgtaccgaccttcttcacaggctttagcttcccggaagtcaccaatgcacttaaacgctgccttgtaaccccgaggagctcgcctgcttctgcagctgtcaaaacttcatcttggataaatttaattttttcgttttccttcatgccttttttcgctccaaatcataattaatccttttaacagtgtaactatcacagccaggtataaaatgatgcctgtgattttccccagagtaccaactttttcaaaatcaattgcaaaaatgcccgctattaggatgagcatagttgccatgtctaatgagctgtaatgcttaaaatattgtttcataatttgtggacgtgatataatgaattggagagcaaggggatttctccccttctctcgctcactatgtttagcgcttcttgcttacccggcgggagcgctttttctttttcttgcctctttttttgctttcgttttgccatatatcataaatgtgtttgaatatggtcaccactccagcagtggcaagaatccagtttcttacctcgtccactttagcacctcctttctatattttaattataacaaagctatttacaacagtcaatagcattgccaaaaaaagttccttttcaaataaaaagaactttttttggagctcaattatcctctgtggttgtgagcattcttgagactttagaagctgttaaatttgagttatgagaattaactttagctctttcctccccctcacgtacaatactatctataagaaatgtattgaatttgttaagattagaagtgttaagagtcattttgattgccgtacctgttagatcagtatcatagaggtaatgtcctttgcctttaatagaaagagcatttttacctgaacatatcaggaaatcccctccgtgttgacagattttacttgtaacaaacagtccatatccagaattatcccaatcagaatttgattgtcctcgcatgacaccattatactcaaaagccttgcccgaaattccaggctctatagacaaataaagagcatctttatcgttttttatgttaagatttgggttgacacccaaagcttgtgcgattccgacaccttcatccagcaatgcaatttcaactttatctttagatggccaatattgtcctgcaaaccagaaagattcagaagtgctatgttcaacaatgttcctcattaattctcgaatagagtaaccaagcacatctttaagattattattgccctgtgacagtacttttgcgagttcataagatttacgttcaatagttgtttgcactacttcattgcgattgtatgattctattcttaaatctctaacttttagttcagttataggaatatatgtattgcttccccatgcttctcctggtttctttccataatcaattctccaactttgaaaaaaccccatgtgtcctgcatattctttatcatgatgattatcgcaccaaataatacctgggtatctttccacgagtcttctgagcttcgatgcaaccataagcatgccaaaaggctctaccgtatttgaatatttaaaatcaaaaattactttctttatgccgtcaaagtcaaatgaattattacaaaagtctattgcatttcgagctgtcaaatccggcatatgaatttgtttttcatccataaactcagctcctttattaatcatgataggtttattttaccacatctcgcattgaatggctttttttgataggaattcttcttttttacccataattgaagcatgggagaatctatatagctagaacctgttaaattctcagtcaatagtaagaataacctgaaccaaatgattcattttcagtgatccacaggatttattccccaattggtttccgtatagtggtaaactttatactgattgtaaccaaaaggattagaggagaatgccatgaagacgctggatgttcaagcgctgcacaatgcaattgatcaaacgctggaacaattaaaacaacaatcagatgaattctctaaagtcaaaaaagcagttgagggcatcacatcacttgatgatgctttaaaaggaaaaggcggcgacgcgatccgcgccttttacgaggaatgtcacaccccttttcttcagttttatgatactttcatagaggaatacagttccacgctgaagaaaatgaaaagcgcgctgaattccctggaaccaaaccataacggatttatttcacagtcctttctcgaacacgagttggagaatggcttaaatgccgctgatcgcacaacaaaacatttggtttctaaggccaacgccacgatcgcaaaagtcagccatatcgtcgacttaccggatttgaatgacagcggttttcatgaacaaaatcagaaagcgttaaaggaaatcagcacgactcttgaaaagctgcatgcgtttgaccgcgagcaaaccaacgccctcaaaacggctgaaaacgatcttgagacgatgcagagatacatggcgcggctcgaaaagatgtataccggccctaaaattgaaatcacaggttaccaaaaaggcgcgattttaaagccggatgagatggataccctgagtggaaatcaagaaacagcgatgggtgccatgttgaaaaaagtcggagacaaagaagatgtggacactaacactatcgccgatccagaccgattaaaaaaattggcgacacaaaaggtttccaagaaagagtacacccaagaggaattgaatgaactgaaaaaagattatagagtatttaacgatacgctttaccgggcatacatagacggcgatacaatcgtcaagatagaacccgcctacacccttccagagaatgtggaaaaaagcgattttaataaaaatttcgatacggcgatggaatttacaggtgtgtatgatgcagtaagagcagcgtttggatatgaccttgcgacaggcgaaatcgttaaaggtaatggggatcgtttgatggccggattgagtgtcacaccttttggaaaggcatttaaatacggaaagcgcggcttcaagttatttaaaggtgaagaagcgggaaagaaacttgcgaaggtagataaaacaccttcctacggcaaacaatccgtaccaaaaggtccgtatcgcgaagtgcatggtttccctgcaaaagtaaaaccaggagctcaagaaaaacatattcctggaacaccaaactacaaacaagaaatagctaatggtcgtaaaaacaaaagcatcttctacggagataataaaacggcacaagaattgctagataagtttgcaggaaaaggcactctgttaaaaaatggggtcaaagagagagtagactttggcaaagtaataggaaaattctatgataaagatactggtaagtatgtggagactactagaggtttgatacattacagcaaaaacggcgctcatatagtaccttcagagcctttaaaaccttaactgaggaggatataaatgggatatgatcctttaatttcagcattaagaaagtataaaaataacgatttgataatagaatggaaaagtggattaaaggttattggagaacctgacacactctatgaaacagacaacggattggacgatgatgatgtcaattatatagaatatgacgcagtcgcatttcaagtaaataatattttatcccaacccactaataaagattgtggtgtatatgattggttaagacaaggagaaagttccttaattgaaatttcactttatgaagatacaccaagtgcagtatatttaacagacggtcagaaaatatgggagatggatagtgatgaataacaattgacaagttagaatttataaaatctaagccctcttgaaagagggccttttgattacttcaataaagcttcaattttcgcctttgtcttcggcccgtaaatgccgtcggcagacagcccgtgcatcagttggaaccgtttgactgcgtttgccgttttcggcccgtaatagccatctatgccgttattcttcgcctctttgtctggatagaaatagagggcagctaaagcctcctgaatctgccagacggccgttcctttcatcatcgggcttttcactttatagatgccggacggcagcgtgtaggatgattttttgccgcttgatgatgattttttctttttcgcttcaatggccgcgagcgccttttcggttgccggtccataaattccatccaccgcaataccggctttcttttgcagagctttgactgcctgcaccgtttcatttccgtaagacccatcagccccgtatttcggcagtgagaagccagcggcaatcaaacgtttttgaagcgccttgacctgggaaccggacgccccttttttcagaatggtccctgtggatttgcttgactggctcgtggatgatgttgtctttgacacagtgttatttccgagcaaggcatcaacttttttcctgaatgtcgtcagctggcttgcatccctcacccagggagtcggacagcttttatttgtcacatcgtaatggcggacaattttgtttgtagaaaggccgtaacgcttgcacagatcggcaaccagttcagcagcattttgaatcgtttggctgtgaatcttgccatctttttcgacgcacatttcaacaccgattgccgttgtgttagcgtttggttttaaaaagctgacataacagcgattttgatcatgggcatgatatgcgacttcgttttcagggatgatgtgctgcgcctctttacggtccacaaaataatgggctgaagcgtaacgtttatcagcgatacatgtgccgttgaaataatttcgctcattcagtgcggacgcgccaggagtagccgtccagtgcatgacaatccctttcactcctgccaacttcaaccctggccgagtatattgattgactttcacataattcttcacaactttaaccatctgaaccactcctattttgttttaaataaaaaaggctgccagccggcaacctcatttcgttaaccctttttgttttagaacttctttttgctgctttcctttgccagtgacatagttatttttgaaccaagcgaccacagacgtaatgatggtgaatgccgcagagccggccaaatacaaagcgtctgcgagcgtgttgatctgatcttcactgattggaagaactggcttcccgaatacgatcaaagtctggtttaccaacgcaataaaaagaagcaccgtccgaacgaccgtgcctttgtcgaatgttgtcatattgtgtcttcctccttatttttgaataaaattaatgaaaagcgccgcaatcccggagatcaccagtgtacaaaccgctgtgatgatcgcgcccgtaatgctgcgcttaatccatgtggtgttctcttcaattttgttgagcttgtcattgatggacataatctgttgatcgtgtcgatcagacgccctttccagtgtgatgacacgctgttcaagcgttttgtgatcggccttcaattcggtaatctcctgcttgaagacgtcccattcatttgtttgatgcatgtcctgaaatcctcctgttctcacatcgttttcacctcctttgaggcaaaataaaaacacccttattgggcgcttgtcattcctaaatccacacagacggcgggtttgtcataactccggcctgttatttcttcgtattctgccggagtaatatggccccaatctacgtaatctctcatgattgagtcatcatcataacaaccccaatcataaaactgcttaatagccgcaaagtctggatacatcatgaagaaccatcacctttcaatgatgcaacttctttttgaagacgggccaattgataagagagtaaagcgttttgcttttttagcagctcaatttcactcgcttcaggctccggaggcagcaagctttcaatgtactcttttgtagccgtctccttccagaccttttcgtccggataaaatttcggaaggtataaacccgggtcaaatggaatgtccgtccatccatccgggatttcatagttcccttgatcatcaggctgaataatatcattatcaatcaataagaacgtctctttgtcatatttaaaaatgtttttcatgacttatctctcctacaggggaataatttcgtccaaaccataagaagttatgttgtcggacttatcagcgatttgcccctccagcctcatatttccgtttgtttcgatatacaatttggtcatccctgttgtaccgaatataggaacaagtctgctgcggagctggtcaggtctataagaagctggtagcgtcccaaagatcacgcctctattggtaatgatctcgccttttaaacacagaaaaccgccaaccaccgcacacataacttttctagccccatgtttcgcaccgttttttaaaggaacttcagtccagacaggttcaaagtcagtggaagttaatattcttttccaacccctaaagtcaccatttgtatggatggtcgcgaaccacatcttattgtggtaacttgctgtggctataattgtttttcttccagagtttccatccataatgtcataattgaaccatccagcatcatcaggcgcagggttattaggcagtctgttattgataccgtaataaaagccaggtggcaaagttaataaatcagtaccatcaggaataaggattcgcactccattatcttgtgtcaatttatacagttgagcattgttccatttggtacgttcggcagtcgtcacatgaattgtcttattatttgcatgagactcagcccgggactccgcctcattccatttatcacgctccgctgccgtgatatgaatatccgtgtttgtggcatgagtgtctgtgtattccttcgcgcttactgccgctttgtccgtgtattctttcgcgctggctacccctttgtccgtgtattccttggcattcgcttcagccttattcgccttttccgtcgccccgttttttgtttcaatattttcaaactccgcaaattttgctttgatctcatcaagagtttggctgatctccgccaccgttttgttaatgccagcccggagcgtttcaaaatcgtcaacataatactccgcaacaggcacaatgttttgatcttcgagagttttctcgatgtagaaggtaaaaaagaccgtcgcaagcgcctgaccattcgtataataaagcttgatttcggccttaacttcgccgtaatgcttgagttcttcgtcagacaaaacatattcggctttcccgtttaccttgtccgtcagcgtcaggctgcgtttataaaacgagtcatccgcatacagaaggacaattttggcgtctaccgccgaaaggggcaatggaacggcgtcttttgtaaaagaaaaggacagctttgcgctgcccgtatcctgggtgaaaaattggatgttggttgattgtgcgctcgatttccgcgcgtttatatcaagtgatataccaccttgtttataaatcatcaatgagcctcctttacagctgcggatacataaagaccagggcgacaccatatcctttttgatgagagtaaggctgcttgatacgcatcacataaaagcctgttccgtcttctgatttagtgccaattccacctgtgggcacgatgctgtctcctgcctggaccgtatcatcaatcctgacatagacctggccgaccagccctacaacatgccactcgtcccgctcttcccgcggaatatattctatatccgaatcgtaatgtgggttttcttttggaacgagttctttttgaatcaccacattaccgtctttgtcttctgattcaacgtcgatttcttcataaatgatcccgccgaactcatttcttaaatagcgatcattccaataaaaagctgcgccgcccataatgacgccggccgtctctgaaataacgcctaaaactttttcacctttttctgctttcctaattctatcgccgtccaacgttaccaggtaaccggaatcaatcttgctgccgtctttggattcaaagtattcagccaagtcctttaagtcagaaacactttcaatacgaccggtgcctaaaacattcccagcctttgcgtttatctctacctttttatttgaagccgatggactccctgtaccgtatccaagcgccaccgtatagctcttattgttgatgacagcttgtgacgataaaattgtccgggatactccatccccctcaatcctgacattatttgatgctccgatgacagaccggcttccttcttttgttgcggtcgatctatcagaagaaccaatcaccacattccgcgtaccttgtgccttacatccgccggttgaaccaatgacagatgaagcctctccggaagcgacaggatcaccggtagaagccgcaagaaaaccagtctctgatgtcgcatatcctgaagttgtggcaaccctcgttccgccttttaagttgtttggtacatatttatacttttgacctttaatcatcgcagcgtaatcataaccctctgcataaacacccacaatattggcttggctgtttggtgaagtgataccgtaagcacccttgtcccctgtcatgatcccattgttgatattaacgttatatactcccccgccaatcacaatgccgcttttagcagatttataaaatgtgaagtttgaaatgttgacattatcagtacgctggtcgcctccaaaaagacgaatatccgcttcagctttcttaaacccacgcacttgaattccattgagtgagatgtttcggctgcgatattgcagtgcgatagcgggatagtttttataatcgtatgaaggatcaccgatagctgtaaaaccgcttaccacgacatttttataggcggaaatgacaagcgcacgtggtgaaagatccttatacaaggaattaaataccggttcaatcgccgtgcaatctgttaatgtgacaccgtaagctgtcgtgctttcagggtcagatgctaaatgatggccgatatgacggatatcgtatgaccgcacatcacgataagacacatgaccgataacatggacattttgagcagccggccatttggcatgagctttaacctctacgcccctgacatttccttcagaatagcaattcagtatccaagcgtgctttgaaccgtcgtcaatttcaataccgttggaattggactccccctgtttatgagctttgccacttggataaacacaatgtgaattggatatgaaaatatattcgctgtaatgtgtggtaatcccatcgtcgccatatccgtatgcaacgcaattgtctagccatatataacgactcccgttcttcgtataatcggttgttggcaaatgatcataagtaggagctgtaatatcaaaaccgtgcagccctgggtttatcgcctcaacatctttcacccagccgtatttaacattggcaaatgttaagcagctggaatgttgcccgccagtcgcccgaactccgccttgtctattcggattccaatcaagcgacatcccctgcacaaaaatatttctgtttccctgctcatagtctgcatttgtaatcacccattcactggcgggcgtattctcatgaagcttgatggtcgtgataccttttccctttccaatcaagtacgtccaggatgggagcttgatgcctttcacaatataagtaccggcacttaactcaattcgcacccgaccattccctaaagcctttttgaaagcctcagtgctgtcggtttttccgtccggaacggccccaaagtcatctacatacacagtgcgctttattttttgtgcgagtctattaaattctaagtccaggcgatctttcaatgtttgagcaatttctccgtcagttgtcacccgggcgtccactacttctttgacatctgaaccgtcgtgatttgtgactaggttggcaaagcgtgctgataaatttttcagacggtttccaacagtaaagccgccgtggtcgatttgttccgacgtgtgggcggctctggaagactcatgtcttttcaaattataatcgtgatcattcaaggcattttctatggattgcatatcttcacttagctgggattcataaagtgaattacgggttttattatagtgcttaatcagccgcaacatgttcatcactccctttttggcaaaataaaaaaacgcctacctgagcgttttgaaaagctggtcgatatatcgtttttgatctctaagccttttcgcttgatccacatttatgctttggatatctttgcggaagttcgcaaacgtcaatttcggactgctgtatgggttcagagggttgtactggatggacacaagtctcacattatcttcaaatgtgataccatccgccgtatcagccaagacatggattgtgtcacctttccagaaatcttgctcgatctctaaaagcttcggctcatagattttttggaaatcagcttctaccgtcatttccggatatggattcacatgcctttttaatgcagaaatcatactgctggcttttttatagcgctcatccctgatcggttcagcccagcgtggcttcccttcaatcaagaatttcttttcgtctggatgaatgtataaaataggctcaaactcgtactgagggtttttgtcatcagtactgctccccttttttaaggccccgtatccccaggcacgtgttgtactgttttgcgagtttgttgtaattgaaatgccgggcatattatagcgcgaatctagggtgaaattaatccgtttccccatctttttgtagatataaattttgtaattatccacgtctatttcaatcccataatcctcaatgatttcatccattagctctgtcgagtttttatcaccgaaattttcttgatctgctgattcaaattcactctcaggcgtcttaaaaatatatttgaagtctgtattcttcagcgcaaaatcaagcgcatctctcaatcttaatttctttgatacagtttcatgaatcctgttgttaataagcagcacagtgaatatgtggcttgctgtaacggttttactaataacatttttctcttgatgaagttcgacacccgtaatgtaatatttttgatgtttaaattttttctcatccagataaagtatgttatcgtccaccaataaatcaaattctgtgccgttctcctgcgtttttgtgatcgtaaaggtaaaactcttcttacctgtcgtatcgtctgtcagatcaactgacacacccgttatttccacaaccttttttccgtcttttgttgacacatgaagctgtgggaaatcggtatctgacggcagattctgattgagtgttatatctttcccgtcatattccttgcttggataccccggggtaggattcggttttgtaggctcgtcaggtccatctggcaccccatccacagtgtcatattgtgttagattgtaggtttggatgaggttattcaactttgttgcatagttgggatcggaagcataaccagctttaataagtgctgctgttgcttttttgtagtctttttccccgaccacaactttatactgattcgggttccagctcgttccgttcacatacaaattagctaggtcttgaattgattcagtccaagatggatatttccgaaacttggcttgtacacgagttggattctcgttcttatcatattcagtcgtccacataagaacatattgaccgttataagtccccttgatgccgaataagtttttccctttctgcgccagctcgcttgtaccccatccgctctctaaacaggcttgagcaataatgagagacgcgagaatatcatactttttatagactctttgggcgtctggtgcaatttcctttataaaatctgtgtttgccatattgcatgctccttacgcgtagtagaaacgggtatcaaatatgatttcaaaatcattggtattcaagatttcaaacttattcattcctatatcgagtcccgggagtctgccggatgttttgataggtgttttattgatcactgtgtattgcttaataaaagaaacatgctgtgatttttttaattcctgttcaattttcagcttttcaccatttgtatggttgatgatcgtcacattttttccggccgcccataaggtcacattgtagtcatgttccaaaggattgatataggcatcaccagtgttataaacctgaaacctctttcgatttttgaacctgtattccagatcgtcacgcatttgaatgttcatgcctgggctccaatgctcaacgtcaaaattttgctttgtcagagaagtgaatttcgattctgccagtcccgtgatgttgttaaattcaactgtgaacgttacaaagtttttctccttttcttttgggatactaaaatttccatcacaagttacccgaaaacggagattcggcaataaatcggtcgagatataatagggaaacggcttaactaaaagcgcgtaaagctcccgtctaaattgataaaagttttcagcgatgattgaatttaaataaaattcaacggttatttttctttctttatatgtgacatcccttggatgctgtggaaggacaactccgtttattctcgggatgctaactgtctcgcgttcaatccccggtgcttcaggtgtgaagcttaaaggttcaaaaaaaggaagcaggctttttaagctctgctccccaaggccattatcgtaatcaaggaataatttcactatctcaccccgtttataaatgaagttcgagtaaaccgatccccggctgattggtcaatttttctgccatcaagatatgtgttgctgtcctttaataaaatctcctgcaaaagctgtacatttttatttagaaaatcaatttgctttgccatcatactgatttgtttttcttgattctttacaacacggctgatgtctacagaaaaatcattaggcggtggtagctgctgtttgggcttttccgaaactttttgaagcaggagaagtgcttttgaaatcatcccatcctgtaaatccggaagtacgccaagtttgctaccaatccgagcccatagcccaatattacgctccctgtatgaagggtcttccgtgattgttgtttcatcatacccccgttcatttaaaatggcccatttagcgccgccacgaccaggtgagatacctccttttgcataaccaacatagccgccaccccgggccattgatttcaaacccggatgatttgatatatctccatagcgtgccttgatatagttaatggctgcaagaatgttgtctacaggatttaagatgttattatgacccggaaacttataggcattgaaagtggacggaatcgtttgcatcaagccctgacttggatgtccggctttggcgttagaatcccataagttgatggcgttcggatttcctccgctttccttcatggcgatggtcacaagccctggaatccatgaaagtggcacccctgctataccaacagcctctgtaacccacttgtttacggctttcgttccaccagttcctttaaaagtggacgactctggcatgactcctttcaggaatttagctgtcccatcttttaatgtcttaagtataccggttcctaacatatcgataccttttcctgttttgtaggggatcagaccactaaatagttttttaattaatttttttggtccgttaattataaaatccatagcacttgaactaacatccccgactttatccacaacactttttccgaaagaaatagctcctttgaccattttcttagagctttcagcagcttttttaaaaaagttcccgactccgcctgcatatccaggaatccccgaagcagcaagtttttttgactcatcatgaggaagtacagatgttccacgcgggagatcccagatttgcgggccgcccataccgactacatacgttccgatgcctggtgtatgggctaactcccatccttcttcaccgacaagcgcttttcctccagggtgaaaatctgtacctttcgcataatttgcaccaggcgcaatttgcattttagaagtatcttgataaccctttggcttccattccggaatcttaataggaatatgaagaaattcaaaaacgttattaatatagccagtgatcttattcattaccccagctaaatcatttagatgaatattccattcctcaagaatttcacctgtctcccaatcaacctgaccaatatgtccataagcttgaagctttgcctccttgactacacctttatgcgtcttttctgcttccttaattgtttttttggcttggcttcttgctttttcaacagtgtcatcgtgttctttctttgaaattgtgccttttacataatactgatcatcagcagcagcaataacggaatcgcgctgcttttcggctgcttttattgttttttcttttgctttattactatttttcacaacagcagcagcctgtttagcagataagttagaggattcttccttcagcttccttgaaattttaatttgctcgtccttgcttcgagtaagagccgtctccatttcggcaagcattttcccttgaatgtttgtaacttcttcatattctttatccgtaagcttacgatgttcttttgcggcgtttcgataaatcttactaatacgatctacgtatccttgtattttcttttgttttttttggtttccaacttcaattttatttagaatcttagctgcttccttatctgaggttttatcattggaagcataaaattcctttaataccttggtggctgaatcagcgcttgtttggaatccttttttcaaagtctctcccatcgttgtaaactgtgttgcgacatcgtccgctattttcttggtgatttttgcattggttatacggagatattcaagcttagccgtgacttttgtattcatatcttcataagcattcacagcttttgcagtagccttcgaaacccctttaccaaagtcaatagtcgatggaagaacccttttcttcaggttgtcataatagttcatacctgcttccgtaagaagggttacacctgtaatagcaagaccaactggaccgcctaacaagctcaatccgccacgtaaaaggccgacaactcctgctccttttttgagaatgttgaataggccaaaaccgctttttgctaatttcataaagccgccagcgcctttaattgcattggctccaacctttaaaatattcccaccgaattttaagagctcaggagcaaatgaaagtattagcccggcaattgaaccaactggcccgccaaacaatccaaggccaacgccggcaacacgtgaagcaccgcctaggcctcgcatggctttagcacttctgctggatgattgttcaagcctcccgactctggttgttgccagattggctgactgatgaaaacgccccattcgtgtggatgctgctgccgctgccgcagatgttgttgtcattcctgcagccgctgtcctggaagctgcgcccgctgcaatggcttccgtagaataaacgccaaggctgcccgatgcttgatttacattccgcgttaaatagccgcccgcggtccgaagcatattccagcctgctgctacttttggcaaagagccaagcaacagtaagaacgcgccgcctaagagggaaaatacagtgactgcaccgccagtaatcgcaatggtactcgccacagaagggggcaatgaatcaaaccaggttacaagctttgttagtccgtcagctgtagcccggataacaggcaagaactgatttccaaaagtgataacagcattgtttgtagcagatttcagatactcaatagagccagccaggttgtccatttgctttttggctactctttcagctgtgccgccgcttccttcgatttcctttgtgaattcttgaatcttatcttttcccgcgtgcattaaagtaataaatccagaaagagcatgctgcccagccaactgttttgcaattcgaattttttcagtttcggtataatcttttgttttctcattgatctggccgataatatccgcaagtggtcgcagtttccctgtcgaatcggttaccttcaaacctaattcatcgatcgcatttccggcttgttttggtggagatgataaacgggtcagtgtagctcgcaaagctgttcctgccatatcagccttgatcccgctatttgccataatgcctgtcgctgctgctaattcttccatgctgagtcctgccgtttttgctgccggagccgcatatttcatcgtttggccgatctcttgcagggtggcgtttgagttggtgaaagtatacgccatggcatccgcaacacggtttgtatcttcagccttgatatgaaattcagtcaaaatgtcagaaacgatatcggccgtaactccaaggtctgtttgaccggctgcagcagtcgcaagaagaccaggcatagccccaataatttgatttgttttatatccggccatcgcaagatactgcataccttctgcaacttggccatcagtatattgagttgtcgcccctaaatgacgagctgtttttgtaagatcagccatctggtcgtttgtcgcatttgctaaagcaccgacacgactcatcgctttttcaaaatcagcggcagctttaacagtcattccaattccaaacgatcccgctgcaccgagagcagaaagagcctttccagcggttgaggctgattgatatactgcgtttaactctttagatacttctcctgaattgcgcttaaacacagaaaaaacacccgctgctcgccgggtgctgtttgtggtattttcaaattgttttgttactcgttgcagttcattcccaaggctttgatgaacggcaattgcatcattcagccgacggccttgtatctgtgtttctcgattatccagccctttttctctgaccagcttattgtattttgcccgatgctcatcaactaaacggccttgtatgcggtatttattattgagtccttctatttgcgattgaagaaacttagactgattgcccgcagctttataaactgcaccagatgctttcatttccgaattcgctaaacgcatttgccgctttaaaccttcgattccacgattaaagccagtatcatcaaggcctactttaacaatcatatttccgataggttgcgccatatgtatccaccccgcttccctggcataaactcaacgaaaaaagaccggcgataaagccagtcttagaaaaatacttgatcaattggaacaacttttggtttattttcatgagccaggacttctaagtaatggtaaatatccatctcgtcaatttcagtcatggtccatccctgttttaaaagggtcgcatatatatcattgagctgttctattccgttttcaactgtaagtcctccgtttccgctgctggcaaaaaatcttcttcctcatctggttcttcatagcccatgatttctcccataattcgccttacttcatcggaaacttcaaaggactgtaatccttcttgaaaatcctctaaagtaaattgattgtgaaatacccgtacaatgaatttcatacgatcctcaaggcttttgagtacttctttaagattttttgctttagaagctgtctcatctaactttaaggcttcaaacaacgtctttgtgtttgtacggggagcaataaacgttttatattttccttcttcttcaaaccataatttaatagaaatatgtttttgagccatgttgactcctcctttattttgttagatttaaaaagaagcatagagctcccctttatactgtctttccaatgtctacgctggatttattatcagggcctgagtccggatttttataagcattgccaaacactttttcataaaacttgtccaaattgaaattcggtgcgtcctcatcagccaatactttataggcgttgtcttgttcgcgctccataaattcagcagaaagtttgaccgtctgaaaatcagtcttttcttcttttgttttccattcatcatccggaagagaaaaacgccctttcactaagcctacatggcgattcttgccgttggcttttggcccatagaaagacatagcaacccatggcgcgataacattctttttgaacatatagatcccgtctgtttcttctatcccaaacaattcctccaaaatttccattggcagatcccgcatttcaagctccaattttgtggaaccagtcgtgacagccatatccaccagtttgttgtctgcatactgcttttctgttgatgtttccgtattgaccttcgcgttaattgcgtaagggtaatcaataatttttgtagccacataaaagccattttccttttttaaaggcgcaaatttaacgccttccaatccggtaactgaactgtattcaggcattctaaaacctccaattatattaaaatattggcctcaaatcggcgtcccttccgaataagaccctcatcttttaaaaagtcattgattaaaattcctgtttgaaaatccattcgattcatgacccctataacggcagccaaaatctgatcgcaggatgaatcgttgtatacatcaatttgatagacagcgctgtccttgatcggctttccatcagcccacttggtagttctgtagtccaattcctgtacgacgatataagctggtttgcttttgatgccaatcggcaccgcaagttcaaaaatgtttgcaggatcagccaataataaaagcgccggatcagtttccagcgcttcaaatactttattttttaattgcaaagctctttccgctacattcatagcttgtaccctctttttataacgcttgccatcgcctgaagcatcctctcattggcacttagcatactccgctgaatagacgggttagccggctgatgaatggttccgaattcaggcaagtggacacggaacttcgtatcttttgtaggaccaaccactgcatatatctcaccatcgggatcctttctcgtacgattaccaacgataatatcttcatcaatgtggggatggctccccccaatattagaacggggagcattctttttaatttccttcgcaagaatcgcgccaccagcttttacagtggctttatttatcgattcattttcccttgcaagagagcttaaatatgaatctaattctttaaagccctgcatttccatttcgatcttcattattccaccgcctttgccctaatcatggtgaaatttttccgggaatagttcggtatgatagattcaatttcatacaattgattctgaaaaagaatccgcatatgttcgtcgatatcctcgcggtgtcggatcgtaaattttattgtcttctccttctgcaccgcggccgccgcgtaatattcccgaccttttagcccttcggcttttgcccagcattcaacgaccgtttcatagtcaccttccacaggaagacggccgccttcttttttcttttgaaactttatccggtacctcatgtcattcagcattggaatcagtctccggaaccgtatattttaattgattgatcaacgttgtcagaactccatcaagatttgaagtcgtgccggccacttcccggttttcataccaatgcgtaacaaaagcctttacacacatatcagcccgcgctgaattattaggaaactccaacccggttgcagctgtaatgtattcttttgcagaagcgataaacccaagaattaaatcatcctccagatcaccatcgacccggaggaattttttcgcctcttcaagctctttttgttccatttcagtcatagggcatcacctatccttcgttagctagatgttccgccacctttaattcatcaatttgcttttgtaaaccatctaaaacagcctttacttcgctgtttaagttgtccaacatgacgctgccggttccgaggttgttgcttctaacagacttgtccgcaagcatttcatgtaggatacttttctccccaatgtcagccggatcacctttatcacctttcggaccttggggtcctggctctccctgtggaccttgcgggccggtatctcctttgtccccttttggcccttgaggtccctgcggcccaggttccccctgcattcccttaatgtacaaaggattatcctcgctgtttcctttcaaataaaccggtgttaccggctttcctgtaccgtcgtcctctgcagaagtatagactccgttactttggtttaaaaattgatctgccatatctcatcatccttttcaatttttttattttccaacgtcaactgatttatcttctgtgttattggtacttggagtttcattgtcaggaacggcatctttaatagatgaaaattctgcatagaccaccgcatcagtatcccaaagaacgacgtcctcacgttcaatgattcgcatatctgtagagttacgatagaatgctttaccaccgacatttgtcgttaaaatggaatattgctgacgatcaaagagtttgacagcttctttaagatctccaatgattaatggatattttggagtcgtttttgtaccgccgtttggcaaatacttatcagaaatgacggataccggcttaccgaacaataattttttagttggatcagtagggttcggctgaagcaagtaacggccgaaagcgtctttcagtttatctaacacgttaaatcccgattggttcgtgacaaccttagtcgtggcattaatagccggatcaagtttgacattgagaatgtctttaatgtcgtcctgtttcgatattgtcgttttcgcaagtgaacccaattgttcaagaatcaatgtattgcgggttacagccgattttttagcgagccaattggagagatactccaaaagcgcctcttgagtatccgcaagtaaatcatttgagaggaccaaaatccctgcatagtctttaatgctatactttatgttttcaaatttagggttctctaattcttcaatatctgctaattcctcaagatttactaacggggtgatatccgctagtttttcaagaacccttgaccctttgtttgttgataccggaatgacatcgactagatttgccaacgtatcaaattgacgtcgtttttcatttattttcgtggagatatcctgcggtacaataagcccgccgtcctcatccacaccttctttcatcgcggcaagaggctgtggtactttgcctgttctaagggcagatgcaaaaagctgaacatgatttttcgcatctgttttggcgatatcatccgttggctgttgcgggttctttgcctctggatcatgctgcggctcttcttgtgcatatgaaacctgcatgtttcgtaaatcctcatatgtttgaatttgatctttaatttgttgagcctctgcaagtagttttttggcttcatcaagtttgccctcatcggtcaatgcttcaatgtctgtacgtttttccgccaaggcttggcgcaactcccgttcttttttagacattccgccaccggcgaaaaattgaatatcgagtttcaaaggttttttctgcttcaataggcttttttgtttcgatagctttttcaaatgcttgtcctccttaaaaatggcataaaaaaagaacccttaaagatttaagagttcaagtttcatagtgatcttttgttttaatacttcatccggcttagtttcttcagccggacttccagcagcggattgagcaacaattttgcccggaacatgtttaaaatgtgccagtacctgatgatcaatgcaggctgctacatcctttgattctgaaaccatatcgatcaagccataatttaaagcttcatcggcggtgagccaggtttcctcatccagaagctggcgtaaagtcccgtcgtccagtttgtctcctgctttcgcaagatatgtggaaacgatactttcagtaattttgtccagatcatcggcagccttccggaattccgctgcattcccgaccatccccatgtatgggttgtgaatcatcatcatggcgttacttggcatcgtgatgatgtcccccgccattgcaatgacagaagcaatacttccagccagtgcatccacatagacattgatttttgccttgtgacgctgaagcatcgaatgaatagcctgcccctcgaaaacatccccaccgggcgaattaatgtacaaatcaatagagctcacgtcacctaaacttttcaactcagcctgaaaggccttggacgagctctcgctaaaccatccttcgccagtaatagaaccgtaaagcgtgatttcagcagtcgaatcattcagaaccttcatgttccaatacttgtttttcttcttctgttccgttgccatcaccccctttcaggcgatttgaagaccgtttgaccttgctaagttgatactctttcataattgaaaggggaacaaggtttaagtttccataatgctcatcgccgatctccccgatacctgtcatgtcctctttttgaagaatagtattgacgctaaaggcgcctacgctttgcatcgttttataaaattcagcacgtgatttactatccccgcgaagctctgattccaggttaaatttaaagtaatagcctgctccccgctgcttctctgtcaaaaccttatcgtttaattcttgttcaatatttgtgacgattggctgtaaagtggttttgacataatctaaggattgttgctcaatatttgaaaatgtcgcccgatcaagctcacctattttatgaggcggcaccttataaatcgatgcaatctgctggcggttccatttcatcgactctataaattgggcatccttcataggcattgttacttgtgaataatcgagccctgcgtctaaaactgcaatagactgccccgcattcacccgctcccagtcttccctaagaatttgtttactttttcggtctaaaagggtcggcgcttttacaacgccaaacggtgcgccgccattcttgtaaaatttcgcattaaattttgtggcagctctatttgaccctatattgtcccgaataactgaaatcggggtttgacctacaattccatcaagagacaggtttttaaaatgcagtacctcttcgtaaaaaaattcacggtacttgccgtcaagtgtggttgaataccatacccggccgttatttggatcaatattcgtatttgtcgcttcaggatctaatggtctgatccccgtcacatttccgtctttatcaaaaagtaaaaggttgtagctgtttccccaagtgcaaagccttgtaaccaaaagccgcttccacacaaagcttgtcatatagtcattgactttgttcagaatgatatcgctgactttattttgaacctgttgtatgtttccattttgattctgaaaaagtttaatcggcagtttcgcaatatcatccgccaaaacaatcacacaggcatatacatccggatgaagaacggccgtttttgttgataccctttcaccagatgcgctttcagatccagcaaaaatatttttgaaccaatcaaccggatggagaagggaaccgctatcctcttcagcaatttcattttttattccgctctttaaacagcttaatagcatctatttccctccctcatccttatttttttgacgaacaaatcctgccaagctggcaagagaaaataaaaaaacaccggttgcgattaaacccgcgtttacgttcatccgatatatggctattgaaatgaataccatgcccgcaataagcaagatatcctctaaaaatagctgtaaggtttttaaaattttcaagtgctcaccccctacagactgaaagatccagactgaatataagcgtttaagtcgatcgccgtatcaatttgtgaagcccgaacatgtgcattaataagcgcggctgccgggtcaatccgttgtgtggacttggacttatccagcattatattttcctgggcatccacttttgtaacggcgttccccatagcccaagtcagcagatcgtttttattatggatgatctttttcgccttcactttttcgcggaagtctttcgtaggctctgaaagtgtggcaaccccctgccgaatttcaatcatcacatatccgtctgcctccatctgttgggcaaactgtgtagcgttatacgggtcataggcaatttctttgatccgccagcctttctctttctccatttttttaatgtaagccctgatatagtcataatcgacaacagcgccgtcggtgacggttaaccagttcttttccttccacaaatcatacggcacgttatctgtcttcatgtgctcatagaaggtatcttcaggcataaaaccgtgactatccacagcaaagctcccattatccaatgggaaaataaacgagacagctgtcaggtcaattcgttttgacaagtcaatccctacatagcactcacggccggatagattagggaactgatcagatccgcaatccttccaagcctgcatatccatgtatccaccgtcgcgcatattaacccaaacattcatattcttggtcaggaaatccctcatcttttcaggaacagccagagccatttcaagacgatctcgcaaatattttttcccaacttcatgagaagctaatatcggattagcctttatccaattcctttcatcctttatgtcatcgtctttatctatttcgttcaccatgacaaaatactgttcatttgtctctactttgtttggatcgagaagacgtgaaacataatcatactccacacgataggccggattgtttaactcgtgccccgctgtcgtgataataaccatgatcggctgcgttcttgcgcccatccccgactccaggatatcgtaaatctctgacgttttatgagcatgatattcatcgattatgccgcattgcgggttaaatccgtcaccggtcttccctgcatctttagataaagctttgatggttgaatttgtttttgggtgttcaatggtgctgtatgcaatcctgtatttttgctcaggtttgtttagaagttcgcacccttctatttgggcttttatctccttccaacatatttgagcctgctccgtctttgttgcccctatataaacttcagacattttctcattgtttgccattgcttcataggatgcaacacatgctagactctgagtctttgcatttttacggccaacctgccaatacacttttgtaaaacggcggtatcctgtatctttatgaatccagccataaacattaccgaaaataaagatttgaatacgatctggaactatgttttcaccagctaatggcccttttgtatgtttgaattgcgtcatccagtaaagaaagcgacgggctttttcatcgtcaaacacgtaaggaaactctcttgttccttctcttttaatatcatttaaaaaccgctgacaagcccatatatgcttttcgcacgcaacaatctcgcccgatatcacatcgcgcgagtaatcaatcataaactgtttaattgtattcatacattactaaactccttttctgctaaagtcttctcccgttcttcctgggttttcgtgatcgcgagcttggcacgtgcagacggtgtgagtccgaaatcattagcagccgatttcatttgatcatagaagtttttctgtcgtttcagtaggggatgctcttctccaatcaacttgaccggcttcccgttttcaccttgaccctctgtatgaatcatgatgccgtcttcctcaataatttttgtaatagaaatgtactgagaataggcattacaataggcggctaacatgctgatatccgcctccgtcataatttccacctcagataaaagagcagcaatccgcttaaattcttttttagccaccttatccagccaggtaggcggtttgatattttcagagcgcattttcaactttttttcatgtttggccctggctgcaagctctttcgtattctttttatttggattgccctgtattaattgaagggctgcggattttgcaggtctcggcatgtttttcacctcatttctattaaaaaaattgcaattttgcgcttgttttttctcaatctcatgctatgatgaaagcaacaacaaaaccagtcatatcaagccctctcggcaaatgtgccgggagggttctttgcgtttttggaaactttgaaaagcggtgtttgtttgcagaagatggggcgccgttcccggggcggttgcttcccaaggattttcataggggggtatccctacttgaccgacttgcttcggtcgccgtgaaccttgttatggcaagcattgcagagactttcaaggtttgaaaagtctaaacgcttggaccagtcctgcttcacctccacaatatgatggaccatgtcggcaggagtgaatcgatgttctctcaagcatcgctggcaaagacgattgtctcgaagcaaaacaagttctcttgttcgtttccaatctgttgatttataaaaacttgttaatgttttgtttcttgaatgtttgttgtaatgtttcgtttcctcctgctggacgtgcttatggtcagggcagtagccctctcgggtaagggccttacacccataggccttgcactcccttaatggtttaggcggcattgtaatcctccttcagtttcaaacacttattgattcagatcttcatttgcttgctcgactaaaggctgcataagtaggccaatacgctcctttaaattgaaatactctgtcaaaaggcgctcggctttctttagcctcttggctttcgcatattggttctttacacctctaatacgcttttggaggactctaatttgtggggtagtcacagaaaacacggccctatgctggcaggcggggcattgaatatacccaatttcaacgccattctcccttttctcctctcgcaataaaactccattaacctcaccgcaatgcttgcatttcgattccatttggatcatctccctcaaataaaaaacgccctctcgtttgggaaagcgcctggtatattctttctaaaccgggcccacactcagaggctctcattggccgccaatcgtttattctgagatttactggacccggtttacagagaacataaaaaagcacccagttgggtgctatatatgatgatgcactgtaaaccatacagtcattgtttaatcccactagttacaacatggtttaccacaatgagtatgagagtgtgtaacaggatcgtaactagaataagtgtgtggatattgatgcacatgctggaaatgcttatgatgcacatttgttatatgctgcggatgaatatgcggcacaattgttttagaaaaagtatgagtttgacaacaattagtcgggtgtacaattggcggcatcacatttggtttgcaatgaaacatgactaagctctcctttcattcattgatcatattcattattaaactatgataaacagtgtatacatgtaccattacaatcacccatatttgtccgatcgagtactatccacagcctaaatcaaaaaaagcatcctcaaaaattttttaaggatacttaaactgaaaggagagaagttattatgatttcgatccatatttgcagcttgtctattcgaattcattcaaaaaaacaagaagcatccttcaggatacctcttgaaaaaaggggtaattctcgatgtattttattttatgcaataaattttaaaaaataaacttgtctactcgcttaataccataatactcgatagtccagtcttggactgtcctcttatcttagttgtacaattcctccttacgctaaacgcttattcaaatttgcgccttacacatacttcggtaggaagccaagcattgtaaggcagcatgtccaaaaaacatacttcatataatctcccgataccaaagccgcaagactagcgcgatccggctcagaatgctcctcccgtttggcttcattcttcatcgccttaatttgagtatccgaattcaccttgataagggaatggtgcgtatcccgttatttcttgataagtaaatcttatcgataaattacgcataaaaattccccctctttatccccccgattatcggaaaaatgtcgggattttgtcgggtttttctcgatgaaaaaagcactcagataattccgagtgctgttgcaatacggcagattgcccgctgctttatttcataataggtatcctttttcatgccgagttccatataaatattgatgtctttcaccctggcagccgtcaggtatttcttttcgataatcaaacgttcttcatcgtccaagctgttttgtaaagcccgttccatctgtttgactttgagttcattaacggtaaatgaatcccggagggaagggaaaatgttaaagccggcagatgaacattcttttttattctctaattggactttgagcgcgcggtaatttttcaattctttgatgactattttccggacggctttttcgtccacatcatcgagaaaagatagctgttcctttgacatcctttccctccattcgttcatttttctttttcccattcctgaatccgtctttctgcaatctccatccagatgaatgaagcggcaagaatgaggatccctataatcacatatatcatgattgcccccctagttttcctccacaatcacaactgcattgctgatcatgattcgttttccgtccaggtcgaatttcaccttattcccatagtcattgacttcaacatcaaatttgcctttgtatgttttgatcttatttccgttctgatcgtagacagttgccgtccgttctaatccattattggatgcgttaaaatccttcaccattctatcccatgactcacaacctgccgccaacgcgacaagcagcagaattacgattgtggcaatagcttttttcattctcatgctccttccactggtcagcccccaatattgggttttgattgattacggctccgccgcctcccatcatttcaccctttgaagtcttttcacatcatcaatattcatttgatagtcagcctctcggacggcagcagcaaatgattcaatccctttttcccaaagaccgtgacgctcaatgatttccgaaaactcttcaacgtcatgctcgcggatcccccagctgtcgggatcttctgcgggcccgtacatagtaacccatttgcttgagtcattcggatccggttcctcccattccgcgcgggtaaaatgacaaagctcatgatcgaccagggcggcgcgctgctctgggttcatcgtcttccaggcttccttattgatgaatacaaaaagcatgtaatcggtcatatggcgctcaaaggccgtgcattttttcgccttcccggcccatttgttgttaccttcccggatgtaaaaaccaatgtgtttcttcatcttttaaatgtgggtgatgcttatcgattaaactttcggccaactgccgcacctcttgtgattcttcaaaacctacaaatgccatggtcattttcccctttcaatcaatttctttttgaatattgcgtctaattcagccaatgaaagctcgtacagctgccggccgtcaggcgttttaaaataccccattttaagcagccgcgctttaagctcgtcctttttcctttcacaataaagggccttcattaattcattcacacaaggcccccctttaacagctcccgggccatataatgaaaatggtgatagatatagtttccggtcgcgctcggattaataaaaacggttgagaaattgtaacggacttcaaacgtttttaagctgccaagcaaagattgcggcttatattgtgagcgatattttccgttcaatattttttggtagccttccagatcctccacaagaagagtgaaggggtgtttggctgcacggatcaattcattttcaaaccgagaacggtccttaatggattgaaccagctcatcaactccatttttccgttcgatagcagcgttcaaatacatgtcccggctaatcccgtattcctcgtttttcgggatcatggcagaatagtcgcccgtcttcatccctttgaatttgatagatacgttctttttgcggagatagtcaagaacatgctggttcttctgctccctcgtatccacaataatgatcatgctgtcgagaatattttttaattctgtatccgaatagttatagtgaataatcgtcatgctttcttccccttaaagtacgacatggccctttcatagatttctaaagagagtttgtccgtttcttcatcctcaaaattcgcaacggagctgttcagatctctccagccgttctcccaaaatagaacaagcaatctcgcggctttgattgccgcatcccactcatgattgaaccagtcgtctatttttggattcatttcttgatctatgcccataaaataattgatgattttatcaatggtctgtttgactttatgatcctgcactgagtattcaccttttaaatactggatgatccgttttttatgtgactgaacaaattccacaagttctggatagacgttctccggatgctcaatataaaggtcatccccatccagaactaaaggtgaacctaaaaaggcaaggtcttcacaaatttgttttgggtgcattggaatcaccactttttaatgctataccgaaaacaaagagcttatttccagttgattttctaagatcatattttaattgtcttaatatttcataaaacgtccgagtaccgataaatgagttttcacgtaaaccaaaatattctctacatgcaacataaagcaatttggcttcaaccttcccaccacaagaacgaatacattggtttttaatgaaatcctcaatagtatctgcgcaattcattttttcacctcttttaaaaaggggttactaaaagggttatcaaattaaaatttcagtaacccactcgaaatccagtcatatcaatggattgagacatttttttgattaaagggttactgaatttttctatttcactattaagctctataaataataattaatatatatatttatttttttatttatttttttcagtagatggaacatagaaaattcagtaacctcagtaacccctaaataatgtaaatctctgataaacccttatatatcaacgtttaaagcttctttctattgattgaagtaatcttatctgggttgctttttgtagtgatttcagtaaccctttcagtaacccgcccatcattattctttaaaaatcttccttcagcatactgatttaatgttattccatgaataaatgtcttgttttttgctccttttgcttttttaaaacctcgaatttctaattgacgataaaaggcacggttttttaactcaacatcatcattttcataacaccaatctttgtattccttatagagttcctttgcttcgatttttgcagccggatgagtgacacacttttcagcaagaaaaggggcgagaatgtccatatcctcccgatagccatctgttgccttcttgatcgcttccggctctccaaggccttccttctgccacttcaaacagccttcaacggcccagcggaggatcccaggcatttccgcggccagtttctgcggcagcttcttgtctactttttcttttgggatcgtgacagtgaacgggattagccggatccggcgccaaataccttcatcgctgcctttcacgatcggtttatggtttgtggtaaagaagactttaaattccggcgtaaactcaaaatattcctggcgcaggaaacgcgccgacatcttttcgccgccggtgatctgcttcaccaacgattcagacagctgctgcccttcttcactctcaacggccgacacaaaccgggcgccgtccagccgggcaatatcattgtttatggcactatcatttttcttcttaatgaaggtgtcactgtttgtctgacggccatagtccccgaacaagtgctgaaccgtattgataaaagttgatttaccattccggccgttcccgaatagaaagaacatgacttgttccgtggtatccccggtcagtgaatagccaattgccttttgcatgaaatcaataatttcatagtttggcgtgccctggtcatctataaaaatactttccaaaaaagttttccagttcgggcagtcggcatcagtttgataagagataggagatattttcgtgaaaagcagatcccgatcatgcggcagaagttcgcctgtttttagatcgatcacaccgttatcgcaattaaaaagatatttgtgggaatccagttcctgcttcctcactgaaaccattggccgaacatctaaaattgtgttcatccgtatgttgcggcgctcgcatttcttcgcccaatcgttcagctgcttttttcggaatttgtcttctgtggccttagcctcgccgtacaacgcccgtaatgtcttagcggtaatggcttcaatttttcgtttgctgtcttcttcccatcgcttgccgttccagatcagccagtcaagctcgttacaatatcgaatattctttccgtggtagtagacaactcgttccgcgttgccgagctccgtcaaatgaaacgccggcggagtgtcaatgatctcttcggtatcctcaacttgagaattttcgggatgggaaatatatacttcatacggctgttcctgctgttcttccagcaaatcagaaattgtcgtatgagtagaataaacggccgcggcaatggtcatttctccatatgtagcgccatcggatgaatgctgtcgatcccatttctcccggaacaaacctgattcgcgaaacattgaatccatttttgcgggatccttatccgtccagaatgccaaatgattacacaaagccatatctgtggccgagtgatcatcatttatcagatgaccgttaaacagatcctgaatgctcttcccgttcttgctgttgaacatcctttcccatatctccttattagagaggttgctcatatcacgggatgaagcagcagggagtttggaaggtttcgattcttcttttttgtccttcaaatatttctcgaaaagctctttgagctcgtccgttcgttcttcaacggccccgatcccgagactattgccggtaaaggtgaaataacggccgtggcggtatacttccagcccaagttcaggatttttcctacctgtgcccggcccccgcaatgggatcttaccttttgtgataatgtggacgcccttgccgctgggtgaatattcggtgtagctgccaatcgcctgaacaattttctcagcgaacggggacaagacaccatcctccacacaatgatctatgtctatgccgatgaacggatcatcttttgaaagcatgaagccgatcccgtcataatctcgatcgttataaaatttcaaaacggtcgggaacgtcgaccaggttcttttattactggattgagccatgctgccatcaatctggtagggcaattttgttttcttaccgtcacgttcttcggaacgccataaaatccactgaggggcgttttttaactcttgcggtatattcttaaattcgtacatgtgataactcccctttaaaaacgagggagctatacactccctcaaatgtgttttttatgatcaaaacggtacatcatcgtcactgatattaattggttcggtttccggtgctggcgcttctgacggcttaaacgcttttacttccggatatttcttgccgttatgctctctttccccgacaagcaggcgaaccggtttattcagaaacgccttggcccattcgatatgatccttaaattgcattccgtttggaaaacccgcggcctttgatgcttggtgaaatctccacattgcattttccgtaacggtgaagttatcgtataggattttttggccctggcatggctgttcaacgtcagaacgaatttcataatctacgacaaggcgctcatttccggatgcagccgttttggcttcaaagttgataactgtcgcttcgtattctcctggtttaatcggttcaaaagcttcacctttgctgtggtctactgtaaacattatttttcctccttagtctttaaagcttgtaatctatcaagtgcggcagatgccaacttaatagtccattgatcaagttttttatttgctttgatctgaaattcttcaatcatctgggcggctgtttcgttgccggcgacgattgttttaatttcatcaatcaatcgaatccgttcggcttcttcctctgctttcacgtcaataccgagctcaagccattggtaaagcttgcggccgacttctggattgagtttaaaagaagagccttcaaacatgcgggtattatctttggaagtttccgccaaatgatcaataccaatattgaaattgagcatgaattcatactccatttcgtctttttgcacaggcttggtcccgaccttacgcggcgccattttcccctcactgttcggctcaacaacgtactcagttttggtccgaagcgtcgccagaatgtggacgtcattttgcgttaacgtttttattaatttcgtagtttcgggcgcaagtttaccccagttttgaaatgagttaccttgcatttccccatgtttttcaacaatgccgccttcccccgcccaattgtgggaaagcgagtcaattatgacaacttctgcaccggcttccttaattgcttcaagagccatttgataccgttctgtggtataaggcggtgtaaaatcgatgtgcttgaagctgccaatccgtacatcatcaaattgcaagtttgcatacagtttggcgcgacggtgctcagtatccacaacaccaatctttgaccagacttccttatcacttgcatccgggtatgcttcccgcatcattccgtaagcgacaagcagggcaccggcagtctttccggatccactcggtcctataaagccgacaattgccttttccttttcacgctgtgcgtttgtgacttgaaacatctattacacctccactttgaagcttgtggaggcaggttctatttctacccccggaacagcttgtccattttcatcaacgacaacctttttgccgtccacctctttgatagacagagattttttaaagtcgccccatttgacatcttctttgataaattcagtgagaccagcctctttcacatgcttgagaagctgatccttatcggctggcttaggctgctctttaattgtgcggctttttgacttaccgtaaggagtggaaagtgtttttgcttttggatcctgatcgagctgctttgagtgataaacgctgaccaagttttcaaagaacgcaagattgtccgcaacaggtttgagctcctgcgtttcccattcatcgatccgctgcctttcggttgccgccaaagacttaatttctttttcctgtgtctttaaagcagcaattttccggaaagcccaatttaggctattcatatccgtgatctcaaactgtggacgttcctcctgcggcgcttcatttttatttgaaatttcacttaattcaaatgcctgtaatggattcatgtatatacctcctgtattgattttgtattaaacaccatttaaaatgatgttgtgagttttgtttttagtcgcctctgccaaggcggcttttttattcataagctgacggataaaatgcagtcatttgaattttcctgttaatttcagtctcgtaccaaaagctattatcataggaacgctgattaatctctgtgttcaaattttcagcggcatctttcacgttttgaagagctgccttttcatttttacagtgatagacaatgtcaatcctcccaccatttctcaatgcatattcgacaaggtgcaatactgagtcaatctgtttttgatccattttcatcctccttttctacctcgtctttcaaatattccaaaggatatccgtaacggttgatctccgtgaccattggatgttcaatattcattgaaacgatctccttacagttgaaacgtttaatcccctgttcgcaaatttggacgcgatttcgtgaagccgaacaacctgttccgggtgctccatccgtttaagatccttgcaatttaaaatgattgttgccgcaatttctacacatccttcaaaatcatgttcctcgatcgcggcaggcaattccgcaataagatctcgcgttgaaatgaacagcctttccgccttttcgcggtcagtttttagaaatcggtttaggttcatacccgtaccacctttctttattggtataatgttcctaccatctaagataggagtgtatttatttggagatctcaacaattctgtcaataattgcagtagtcatttctttatttacattggctgttcacttactaaaatacttctctacttttccgaaactagaaataaatgtgttagatgcttttttattcaaagtcatcaaaggtaacgatcgctacgggaaaccttacagattaatacttgagctcagtctcgtgaataaaagcgaacaacctatatccatttacgaataccaatttacctcttcaaaatttgaggaccctgtcttttacaagggacatcatagacctggaaaaaaatatattatttctcaaattggtgatgaagaagcatcaattgaaatagccgagtttaaaaatttaaaaccacctgtaaatttgagcccttactcttcagaatatggactaataatatttttgacgattccttacttgagtaatacaacgaacgaaattgatggagaattaacaattaaaacatcaagaaaagactatacaattcctgtaaaagcaagaagaagcgattttataaaagcgacagaattaatgcagtaagagacagaatgacacaaatactactgactataattccaattaaatgaaatcttctgctatccatatgatcaccccgaaccttttcaacctctgttgccgcaggggttgatttattttgtttttccattttcctacctccttttgatttttagatatgcttcttcacaaatgcttgataaatcttcataaaacgttccgcctcgcttaaagcaagccattcttttgttttgatcttcattttctcacctcccttcaatgggtcataacatctatagcaatgtcgtttttatcagcgaattcttcaaacagacttttttgtcctgaggctcttcctaaatcactaactgtcgatactaaggtaaccatgaataaagtgatatccggattctgataatcccaaaggaaatcgaatacctcttcttccgttcctatgcaattgtctattcctttttctttgacagcatgcatggtactgaaatagtctttcattccaaacttttcaccatcatactgcttacggatggggaacatctgcatcaattctccgggtgtaagctttcctattacggtttgaatgaactcaattaaacgcagctttacttctaggaaacggcgtgatctagccttctccaggttgatcatcttgattccagcaaacgcgattttcttgaaatcgtctgtatcaatttgattagttctttgtatttttctcgcactctcaattaccgctttttgaaacatcctgtggtagattgagtagtggtctggctttcgagtaccctcgatcactttgagttgtgttttcatgaaaatcctcctcatttgcttagtccgcaggggcatcttcctcttttactaggaatgctagtcatcttcccctacaatcacaatgtgatctaatgcgaagcggagacaggaatcaattaatttatgtaacttgatacctgtttctgcacttaaatcttttaactgttgatgtgtatctgtactaatcaccacaactttttgcgctttttcgggctgttcacgttttagttctagtgtgcatgtcatgataaaccctcctcattttttaggtctgcatgatatttaattgccattggtattttgatgtgatggtcagtgtatgtcgtttcattcccttgagctgttgctttttttgagtaacagctatccacacttcttcaatcttgaaatagatcattcagagtgcagccaaacaatttggtaagcgcctttgcttctcttaaagtaaattcctttttcccacgttccttttcatggtaggtctgtggatgaataccgatttttcgagcgacatctttttgatacaatccacgttctcgacgagcaacgtagagtttatgtatcatgacgcctcacccacaccgtacttaatggccatttccttcacgatcgctagataaatttcagtcaagcgagcatcatcgccaataacgtccattttgtttaccttgtctatttttgacttaggcacaccgtttaaggccatttcggatttcttattcgtaagcctaatggataaacgacacctcgctctatcttccaacaattgataactttctttcctaacatctgcataggcttggaaaccgccttttgatagcgcaatagcattgatgatcttgttcactttctttttccattcagtaggattaagcgaaagaacttctttaatgttgtcttgcttcttttcaacagcatcaaggcgtttgtcttgttcctgctgctttagttgtgtacgggctactgaatcaaaaatttgcttgaacatttgtagttcagggcttaactgggatgtatcaatttgagtttgcttgacgttgtaatactcatccaaaagcatttcataagcgtcccaggcttgatcggtatttagtgacttcgcatgaagccatgcacctttttccgtccaaaggtagagcgtttgggcgttttttgaaccatcctcaatttgcgtatggttgataaaatcccgtttttccttcccttgcaaagagtaaaaatgtttcccttctttaaagcgatttatgttacgtttaaaattctcggagatccgacggttattcgtcccatagctttctgccaactgggctgttgttaaaacacgttggttattcttttcaataattgatagattcattgttttctcctttctatctccctttctgctaaactattgattgaagggaggtgtatcagtaatgagtgaaacaggtgaagagttacataatcatccagatgccttcgattatttaactcctggcgaacaaaaacatttaactagttggattgagactaatctcaaacccaccaaaacctttaatgaccgtcgcacctcttatggtttgaaacatttgtttgaagacactggtggcttctatataggtaacggcgcatttaaaggtgcgatgataaagtgcgggttcaaagcgaaagatgaatcagcacttaattgggtatttaacgtatccgaaagatcggttaatcagactcgtattcgagcaaatcgtttaaagtaacctttacgcactcccattcttcgaaggcaaggacgccttgttcttttaacaggtttgctaaatacgtcttacctgtaggtgcctgcttccccgttattaagatgggagtgccttcttttatagcagttccaatttcttgtttttgtaccctactcaaccaaccaggtaagtttaattcagattcagctaagagcttctcgtcctttaccttaaactgtctatttatgctcatttttgatttgcctcctacgaaattttcgttgtttccaaatcggaaacttttttagcaaaaaaaatatcaattttttctctttttattccaagtctattagatattagggagaaatcttccactgtcaaagctattttcccattctcttttttggaatacgtacctttagaaatgccaaggaagtcagccatgtcttgcacagttagacctctggcaattctttctgctttcaaacgattgtaattaaacttcattttttcacccactttcgtttgttgttaggtccataataatatcaagtttcctaattgtcaactattagctcaaaaaaacacaaaaaatatttttaaccctaattattgtttccttaaaggaaacatgttattatctgattgaaaggaggtgctagcatgagaaattcaattgaaatagcacagtatataaaaaagataagggaaagaaagggtctatctgcggtagaacttgccaatagggttggtgttacgaaagggactatttcgagatacgaaagtggaacaagaaaaattccgatggatgacatacctaaattcgcaagtgttttagatatttctcctgttgacattttgattgaatcgagagatgaaccagtagagatcaactcaaccaaatacccatactacccgataggcatatccgccggccttcctttatgcatagacagcatagatgaaaacaatgtggagtatatctcaataccggacaaccttatgggcaaatgggcaggtaggaaagacatctttatgatgcggattaatggagatagcatgaataggattatgccccacgactcactgattgcagtaaggcctgtaccattatccaatctacgcgatggagatatagtggtttacagtgacggcggggattatgctgtcaagagattttaccgcagggaagataaagttatatttaggcctgattcttccgatttaagttttacggattacgtaacatctgctgataacatcgatttaagaattcacggaaaagtagttctatatatcgcagaattagattaagttgttagcgctaaaaatttaatcacaggcgggacgatcacccgcctttttttaaaggagtgaatttagtatgcctgtctataaagacaaggaaaggggaacatattattttatcatatcctatacaaacagaaatggagaatacaaacagataaaaagaagaggatttaaatcaagcggagaagcgaagagggctgaagcagaaacccttttacgactagaaactgacgacggagaaaatgaagataatccaacttttgaatttgtcgcaaaagaatacttgaaatggtacaaaaaaagaagaaaggcatcatcatatttaaaaacaagtagcattataaatactcacttgataccaaggttcgggagcaagaaaattaacaacattcgttcaagggacataatgcgttttcagaatgatttgcttgatagatatgccgttgcgcacgtcaaaaagatacatcaagttttatcggctgtatttaactttgcgattaaacaagagtacacaaaagataatccagcacgtttagcaggaaatgtggatatagaagaagataaacacatcaattattggacgttagacgagtttaaagcgtttattcaacacgtagatgatcagttatattatgcactttttatgacactctattatagcggtatgcgaaagggagagttattagctctcacatggggagatattgattttgacagtaacactataaatatcgataagaccgtttataaccgaatagtgactaaaccaaaaacaacatcgtctatacgaaaaatcatgatgcctaaacacgtaatgaggttattagctcaattaaaagcaaaaaccaagacaaaaatgacatatgtagtatttggggaatttcatgaccacatttcaactacaacactagatagaaaatacgctgaatacgttaaggcggcaaaggttaaaaaaattcgtctacatgatttccgccattcacatgctagctatttaattaacaggaacacaatcccatctgtcgtggcaaaaaggctcggtcacaaggatgtgggcacaacactcaacatatacagccatttatatccgagcacagaaaaagaagccgtcctcaaaatggaagacgacttcaagactgctgaaattattcaccttaaagaagcttgatactctagcgcgtaaaaattcttaccacaattcttaccacggtttcataaaccctatcaaatcaaccttaaaactcaaaagatggagacggtgggagtcgaacccacgtccagaaacgtcgattgcttcagcgtctacgagcgtagccctgcatatttagtttcgctcatcttcgtgcctgcgggcgggccctcggagagctagtctgatgagtctcttcctgcgccctcagacgggggcgcaagcgtagcctacttcgttatgggctcttaaccggcacataggcgatgcgggcaagagctcgctgcgctaattaggcagctagtgctaagttctggttagatttgccagttatatttaggtgcgtttttacgagatcgcctctcggctcgcagctcaagctcgatccgtccctgtcgaatccgtaacgtccccttggatgaaaaggaagccggataactggctgcatcactattataacaagatcacgcgtcaattccaaatggtaatgtctgtgatcacgttcatataggataacatgagttctggctttagatcaagcctttttgcctgtcgcggaacgctctttcgatttcgcgtttggcgtctttgcgcttcaagtcttcgcgtttgtcgaacttcttcttcccttttccgagaccgagcagcacttttgcgaagccgttcttcaaataaatcttgagcggtacgagcgaatatccctgctctttcgtcaaaccgatcaatttgttgatctgcttgcggtgcatcaaaagctttctcgttcgcaacggatcatggttgtagcggttcccctgctcatacgggctgatgtgcatattgtggaggaacacttctccgcgttcaattttggcaaacgcgtcctttaaattcacccgaccggcgcgaatggacttgatttccgttccttgaagcacgatgcctgtttcgtatgtttcttctatgaaataatcgtgatttgcttttttattttgggaaacaaccttcccttctccctttggcatacggcaacctcctcccgccttcaatctcactaaagggcggcgaatacgtattattctatcaaatgaacgttcgtcttacaatttcgccgccctttttttgacgtgtgccgtctattttttctttttcttgcgtttttgtttcggcgcgttttgaaaaccgcgttttttctttacttttttctttttcggcttggtgaaccattcccctttgtcagccgatggagcctctctttttgaagcctttttctgctttggctccggcttctgccggcggcgggagcctttcatgccgacgatttcaaaatcgatgttccgctcgtctttattgacgtcaacgacgcggaccgtaatctcatcgccgatccggtacacgttgcccgtgcgctcgccgatcatcgcgtagtgctgttcatcataacggtagaaatcatccgtcataaagctgacgtggacaagcccttcgatcgtgttcggcagctcgacgaacatgccgaagttcgtgacggagctgatgacgccgtcaaattcttcaccgatcttatccagcataaattcggtttttttcagatcgtccgtttcccgctccgcatctacggcattgcgttccatatttgacgtatgctcggcgatctcaggcagtttctcggcccatttttcccttgtcgcttcgtctgtcttgccctgaatcaaataggtcctgatcagtctgtggacgattaagtcaggatagcggcgaatcggagacgtgaaatgcgtgtagaattcagtcgacaagccgaagtgccccaggctttgcggatcgtatttcgcctgtttcatcgacctgagcataaccgttgaaattacggcttcttcaggacgatccctgacttcttcaagcacgctttgcagcgctttcggatggatacttcccgccgttcctttgacgacatagccgaatgtcgtaacgaactccaaaaatctctgcagcttttcctgatctggatcttcgtgaatccggtaaataaacggaacattcatccaatgaaagtgctcagcgaccgtttcattggcgacaagcataaattcttcaatcagcttttcagcagtcgaccgttctctcaagacgacgtccttcgcttttccttcttcgtcgacgagaaccttcgcttccttaaagtcaaagtcgacggctccgcgttccatccgcttgccgcgcagaatcgcagccaagtcttccatgtctttaaacatcgggacaagggcctcatacttctgtttcagctcttcatcatcatcgactaaaattttgttcacatcagaataagtcatccgctcggtcgttttaatgacgctttgaaaaatttcgtgctcgacgacttgcccttgaggattaatgagcatttcgcatgacattgtcagcctgtcgaccttcggattcaaggagcagattccatttgacagcctgtgcgggatcatcggaatcacccggtcgacaaggtagacgctcgtgccgcgttcatacgcttcctggtcaatcggagatccttccgttacataatggctgacgtcggcaatgtggacgccgagtttataatggccgtttttgagttttgtgacggtaacggcatcgtccaagtctttggcatctgcgccgtcgatcgtgacgatcgtttgatcgcgcagatcccgtctgccttcaagatctttctcatcgattgtatcaggcgtattgccggcctgttccatcgcctcagccggaaagtctcccgggaggccgtgcttatgaataatcgaaagaatgtcgatgccgggatcgtttttatgaccgagaatctcgatgacttccccttctgcactcatccggccttcaggatagcttgtcaggcggacgacgactttatgaccctcgacggcgccgtttttggcgtgcttcggaataaagatgtcattcgtgatttttttatcgtcgggaatgacgaagccgaagtttttcgtctctgtgtatgtgccgacaatcttctgaatgttgcgctcgatgatgcggatgatggccccttctttttttgtaccgccggattctgtgctcaggcggacgagcacggtatctccgttcattgctgtgttcagctcagacggcggaatgaagacatcgtcaagcgaggagtcttcgggaaggacaaacgcgaagcctttcgcgtgcgccgacaccttccctttgatcagattcattttttcgggcaaaccgtagcggttgcttctcgttctgacgacaagccctttttcttcaagggttacaagagctttgacgagctctttgtattcgtccgaatcggtgatttccagcatctcttccagttcctgaactgtaagaggtttatatgcttcttctttcataaaggagagaagcttatccataaattcttctttttccactaatcagacctccttatgtctgccaatccaacgtttctaaaaattgatacacatccttgtgcagtgtttcgcgttctttatccaatgtgatggcatgacctgattcttcataccatttcagctgcttatcatccgtttcaacttcattgtagatgatgtttgcgctatccgtattaatcatatgatcgtggcgcgcctgcacgacaaatgtaggcgaatagatcatgtccacatgctctctgacatcggcaatcaaatcctgcagtgctttcaacgtgttcatcggcgtttttttgaattcttccatctcagcgttaatctgctccgctgtcttgccttcaaatttcttataattgcgggcataatcaagcacaccctcgtacatcgtctcttcgcttttgatgtacatcggcgcgcacattggaacaattccctttatgggtacagtgtaacccaatttcaatgaaaaaacccctccgagagacagtccgcaagcggcgatttgttcatatccttccgatttcagatattcatatccgtccatgacgtctttccaccagtcttccggtcctgtggagagaagttcttctggaggcacgccgtggcctttatattggggcgcatggcatgtgtagcctttttcattcaaatatcttccgagcattctaacgtccgccgtgttgcccgtaaatccgtgcagcagcaggacggctttttttccgcctttaaatgtgaaaggttgtggtttgacaattttcatgattcactgtctccttttcatatgtattcttccacgtttagtcttgaaacaaactttatcaatcggccggccccttcagacaaagaccggcaaataggaaaaaggcctgacttgaacatcagacctcatgcttcattgtcttatacaaagtaagcaagcgcaatcgttaagaaaaagaaaagcacggttaaaacgaccgtcatccggtgaagaatcaaatcaagtcctcttgctttctgctttccgaaaagctgctcggctccgccggaaatcgcgcctgataatccggcgcttttgccggattgcagtaaaacgacaacgattaatacgatacttacaatcactaataagaccgttaaaaatgcggccataacctacacctccagacaaactggctgacaatagttttattttacatgaaaagcaagcgcatgtcacgagcgtttcgaacagctttttttattttttcccagcgccggaataaggtatacaaaaaaagagagcggctctgctccctttcctgcggaatatgtaatcacatttatttcttttctgacagtgccgccatcatatcttccaggagcatttccgctccgcgcgggctgagtacgattttgccgcccgcatacgttttatttttcgtggtgatgtcgccggtcatcaaacatgccatgtttgcggcgtattttgtcaaaatgatgttttcgccgtcggtatatatttcgagcgggtccttttcattgatattcagcaccctgcgcatttcgaccgggagaacgactctgccgagctcatcgattctccggacaatcccggtatttttcacgtttgaaaagcctccttttctcctttctttattgacttttgtcaacatctttataataaaagagatcttcaaattttttgttgaaatactgaatcatctttccgatcacaagttgtccgggcctcctttcgccatttaaaactctgctgagtgtcgccggggatacgccgatttcaatggcaagctgatttaaggagagattgtgttcaatcatgtactggagaacaaaatctcttttgatatgaatcttttttaccatgattactcccctttctaatctcttatgtttctttttatctacattgaacatatacgatttgttaacttttgtcaatacttttaccatccatatgtttcctataggcaatattcgtactaaaatattttataataagagattgcgaggttttggccatgacgaactttggacaccatttacgacaattaagggaacggaaaaaactgaccgtcaatcaactggcgatgtattccggcgtcagttcggcaggcatttcgcgaatcgaaaacggaaagcgcggcgtgccgaagccggcgacgatcagaaaactggcggacgctttgaaagtcccgtatgaggaactgatggcatctgcaggctatatcagcgcgtctacagtccaggaagcaagaagcagctatgattccatttacgacatcgtgtcacagtacgatttagaggacctttctctgtttgacagcgaaaagtggaaggtgctttcaaaaaaagacatcgaaaacctggacaaatatttcgactttctcgtgcaggaagcaagcagccgaaacaaaaactgaatacttctccgcggcacactctcctctctatcattttcgtctgtttacgatcctgctgttattttatcccttatgttaacttttgtcaatatttttcctgtctaagtatttcctatagtcaacatttgtattaaaatgttcatatcatgaatttgcgggggggggatggcgatgacaaggttcggcgagcggctcaaagagctgagggaacaaagaagcctgtcggttaatcagcttgccatgtatgccggtgtgagcgccgcagccatttccagaatcgaaaacggccaccgcggcgttcccaagcccgcgacgatcagaaaattggccgaggctctgaaaatgccgtacgagcagctcatggatattgccggttatatgagagctgacgagattcgcgaacagccgcgcggctatgtcacgatgcaggagatcgcggccaagcacggcgtcgaagacctgtggctgtttaaacccgagaaatgggactgtttgtcccgcgaagacctgctcaacctcgaacagtattttcattttttggttaatgaagcgaagaagcgccaatcataaaaagccgaatttcccttttaggagaagttcggcttttttcggctgccttaagcggcatccggattcggcgtcttgcctttatgatgcttaacggggctcagcgcacgctcgagccatcccatgaacagatcggcgatgatcgccatcagcgccgtcgggatcgcgcctgctagaatgatcgctgttccgttggtcgcgtttgatcccctgacaatgatatccccgaggccgcctgcgccgacaaacgtgccgatggccgtaatgccgatcgcgatgacgagcgcggttctgagccccgccataataaccgacaaggcgaggggaagctccaccatccggagcacttgaaatttcgtcatgcccatcgccttccctgattcaagataggcatgctcgatgctggcgattcccgtatatgtgtttcgaatgatcggcaacagcgaatacaaaaacaatgaaagaatcaccgtgtttgcgccgagccccatgacaagcatcaagacggcgagcatcgccagcgccggaaccgtttgaatgacattagtgatggaaaagacccatttgctgattttacggtatctggcgatgaaaatgccggccgggatgccgacgacggcggcgaacaatacgccgtatgccgacattaaaaagtggcggtaaaattcccccagcacatagccgccgttttgcgcgtaatacgtccaaagctgctgcagcacttccatttgtcatcccctccttttactcaaaataattgtgcttctttaaaaactcggccgcgacgacagaaggctctttcagctttccatcgacttcgtaattgagctcctgcatcgtttcggtgtcgatttttccaatcagtttattgatggtctcttcaagctccggatgctccttcagcactttttccggcacgaccggcgaacagtcatacggcgggaaaaagcgtttatcgtcttttaacagctttaaatcataggctttgatcctgccgtctgttgaataggcaagaacgatatccattttgccgtttttgacggcgtcataaacgagtccgatctgcattggaaaggtcgagccaaatgaaaacccgtattcctgtttaaatcccggatatccgtcgccttttcgtttcagccatgcattgtcaacgccaagcttcagttgatccgcgtcttttttcagatcggatatggtttcatagttccctttttcagcgagttctttcgtgactgtaaaagcgtacgtattgtcaaatccgtaagaatcgaaccatttgtagttgaatttcttttgaaagtcctgctgtacgatgcggagcgcttttttcgggtctttctccgcttcccttccaagcgtgcttgtcaggtcagttcccgaatagcgcgtcgcagaaatgtcgatgtctccgccgagcatggcctggtgctgcacatagtttgagccgaggtttttgaccagcaccgtattgagatccgtatcatgctcgatcaaaagcgagatcatattggcaagaatttcggattcggtcaggttttgcgctccgattttgatcgttttatcggaagccccgccaaggcccggcagcgcacagccgctgatcaaaagcgagaggaccagcatgacggcgccgagccgtctcagtttttttgtttgcataagagccaactccttatgatacttccttcatcccttttaatccttgaggcgtgactttgtcttcggttttcgacagaatatagtcgatcacgatggccagtatcgtaaccggcaccgctccggcgataatgtactcaggctggtacaggttgagcccgataaaaatatagtcgccgagaccgccgccgccgataaaagccgaaagcgtcgcccagccgattaagtaaacggtggacgtccggatgcctgccatgatcaccggcaccgatagcggcagctcgaccaggcggatttgttcccatgcagtcataccgattccctttcctgactcaagcaaattttgattgacgccttttacgcccgtgtaagtgtttctcagaatcggtaggactgaatagaaaaacagcgcgacaatcgccggaatctttcccactccgagaagcgggataaaaaacgccaggatcgccaaactcggcagcgtctgaatgatgttgacaacgccgatcacgacgccggctccttttttcattctcgttaaaacgacaccgagcggaaccgcgaaaatgatgccgagcagaaccgcgaaaatggatatatataagtgctcccatgttttataaagcatttccccgccgttgtgctgaagaaattggacaagctgattcatgattgatgcacctccctgcatttaacgttgaacaagggtttcttcatctccccaaatcgagtcgtacacgatatcgacaaggtttgcccttgtgacaatcccgacaaggcggccctcttcatcaagaacgggaacatatttgaatccccttttcaaaattttccggacggtatccctgatgagcgttcctttttgaacggagtaaacattctcattgacaacctccccgactgtgacggattttttccggttctgatcgatgatttcaacatcgatatatccttttaagacattgtgttcgtccacgacgagcagtgaatcgacgcggcgttccctcatcacttgaattgcttcagtcaggtttttttcgctcgtaatcgtgaccggattcgggttcattacttgttcgacatgctcgatgtcaggacgggactgaagaagcctctcttttccgataaattcctcaacgaattcatccgccggtttccgcaaaatgtcgtcaggcgatccgacttgcacgatctcgccggcgcgaaggatgacgattctgtcagcaagcttaatcgcttcatccatatcgtgggttacaaagacaatcgttttgtccagcgatttctgaagctttttgaactcttcctgaagcgaatcacgggtaatcgggtccagcgctccgaacggttcatccattaaaatgaggggcggctctgccgcaagcgcccgcagcacgccgattctctgctgctgtccgccgcttagttcatgagggtagcggttcaaatattccggccccatatcaacgagctgcagcagttcctccgcccgcttctttcgcttttcttccggccatttcaaaagcctcggaacgagcgtgatattctgctgaatcgtcatatggggaaagagtccgatttgctgaatgacatagccgattttccggcgcagctccaccgggtcctgatccattatgttttctccgtcgatgtaaatgcttcctgaagtcggttcaatcaagcggttgatcattttcatcgtcgttgttttcccgcagccgctcggtccgataaagacgataaattcaccttttgctatatcaaggttaatgtttttgaccgctttttttccgcctttataaacctttgatacattctctagcttcagcaaaacgcacacctccaactgttttttaaaaatttcaacatctcattcattataagatacactttgtaaaataaaaagtttacaaagtgttcaaattatatatataagacataaaaaaatatattcatggcatcaatttgccggttattcttaaaattgcggctgatttctttgtttttctgtcgttttagtgttttcaaccgctaacaaaattatgatatattgacaataaaattggctgcccgaagggatgatgagctttggaggaaaacgctttaaaagtgattgaacaagcggaagaacatttcatagaaaaaatcgccgaaaatatgaatacatacggtctatcatcaactgtcggccgcgtgctcgggatcatctatatgaacagaaagccgatgaccttaaatgaactgtcagaagaaacgggcatgagcaaaacgagaatgagccaggtcgtccgcgaaatgatcgatttaaatatagctgaaaaagtttttgaaaaaggcgtccgcaaagatctgtacgatgtcgaacaagactattatcaaacgtttatttcattgtttacggccaactggagcaaagtcgccaaaaagaacaggatgattgggaaaaaaatcagaaaagagctgttggaggcgctcgaggaagaaggccttacgcctgaaaccgaagctaaaatcaacgagctgctggctgaaacaaaacaatggatcgattactgcgagtggcttgacaatctgatcgcgtttttggaaagcgaagagatcttcaagcatgtgccaaaaccttcataaacaaaaaaagctgcgaagactaagcagcttttttgcatttcctcaattatcccgccaacaccggaaacatccctttcaatcccgttccgatcatgccgaccgccacgacagccaaaatcaggcccatcagccgggtgatcacgttcatctccgtctggcccaatttgttgctgatcagcgtagaataatgaaaggccgcaaacgtcagcaggaggacggcggcgatgccgatgatcattccgccaaaatgcaccagactgcggcttccggccgaaaggctcatcaccgtcgcaatcgttcctggccccgaaatgatcggaatgctgagcggcgtcaccgatatatcctccttttccttgctctcgcgatgctcagcatgatgcagcgactgaacatgggactgctttgcattcagcaggttgtaggcaattccgaatataaatatgccgccggcaattcgcagcgcatggatgttgatgtcaaaaagcctgaagataaactctccgaatatgagaaacgcgatcaggatcagaaacgataaaaccgcggcctttctcgccaatgcggtgcgttctttcgcttcgtagccttctgtgagcgctaaaaagatcggaacattgccgatcggatttgtgacggcgaacaatgatacaaaaacgtggatgataaaagcaaacacggttaaagccactccttcctctgtataaaaatacgggtaatcgatttttacctccgacgctgaccgcttaaactttcaaaaaacaatgacaccttcctgcactttcatttataatgaacctttataggccaaaataactattttaaaggagattttattttcatgacatgttcaaagtgcggccatcaaacagatggcggaaaattttgcgagcagtgcgggtcaagtttggccggcggcagtgatggcggaaaaggagcagctgaaacgccgcaggcagctagatatgcggaggcggcgaaacaagcgtcttccatgtatttttcctattgtttaaaggtgctgaaacgaccgtttatcgaaatgaaaaacgccggagaacagcacgtcctcaacagcatcaccacaatggtgatatttgcgctttcggtgccgctgatgttttatttcggcctcaaaggcttctttgacgccatgggggactattccggagtattcggccgctcctacgcaatgccgacattttttgatatcgtcgtaaagcccgctgttacctttgctatttatattttcttattatttgtttttacatacgcaggcgtgcgcattcggggtgtgcaagcggcatttaaggaagtgctcgggcggttcggagcggtgcttattcctttcgtcgcccttctgctcgccgctttgcttttatcattcatgcaaacgggtttgtttatatatgttcttttctttgccctttgcggcatcgcctttttaattccgccggctgtcatctcgagctatcacgaaaaagcggaaggcgctgttgatacgatttacgcgacgctgatcgtctatttgctgacatttatgtcggtgcggatcatgggagatttgtttcttgaatatatcggaaggatcggaggctctatattagggcggctgttttagtgaattgaaaagcctttttccattgaggaaaagggctttttttttattctattgacgttaagagcaatctgccgtcctcgatggcggcgtgatatgtccaatgatacgtttttaactgttcttttccgcctttgataatattaattttctccgttgtcttaatcgttgcctcccgcccgttttgcttccagctgtttacgctgaattggacgacttcctcctctgtcccgctgttgtacagtttagcgaccagtttcttttgatcgttgtacagcggacttccttctttcaagctgtcgcggacgaggccgaaatcgtttgtgttgatggcgtcttgtagcctgtataaatacgcttcaatggcgaaagcaaccttttggtcggtgagctcttcgcctgctgatgcattgttcatggcccctttcgctgaggcccatgccgatgtgtattccttcggattgtcatttttgatttctttttgatgctcgatatcgataacggcttcaggatcgcttttttcgatgagccactttttcttgccttcggaatagaccaatgtgtacgtatatccgctatcgttttctttcagtttaggcgcaatgtagtcgtcataataggccgatttgtgcttttcaatccctttgagctctgttttccattgcccgtcttctttgtatagccggaacgaatcaagatcaaatacagtagataagtaggtgcctttatagtaggtgctgctgcttttcagcccgtccgtgacctctttcaggcggttttgataagacggggcggccattgtcatgccgctgacattgccgcttgcaaaggcctttgctgcttcctttgtatggttgacgacagcggtcatcatgtcatccataaaccctttgtctgatgcaagattgacttcgatttcttcaccttcaatcggcgttttttcgcttttcagcttcccccacggaaattgcgcctcaacctgagcagacattgaaccgtcagtcagcacaggtccgaattcagttcctttgaatggattgatcttcatctcctgatcattgatccagagcgttcctttcaagttttcatagccttcttcaaagacaagctttgccatgtgcccgttaaggtccgcattaaccttcacatcaccttggagggcggtgaccttcaagatcggcgattccgcttttcagctttgccttcacctcgtaagtaccggggacaaacgggccgatttttttctcgaagttttctttttctgttgtgatgacctttttgccgttaacaaacaggccggtatctttatagtttgtcttaaccgttaagtagacaggctccgtgttcaagacatagcggtcatagatccaaaaacgcctgccctttttttcgatcgtcatcaatggatggccggcaccgctttttaaggatgtgatcaattctttttcttcatccgggtgttctttcaagtaatccaagagcggcttgacgtttttctccgtgacagccagatccacgtctgatgattgaagcagttttgctgctttcttggcatctttctgatcgagggcggcttcaaaatcggaaatcagtttttcctttgatgtgagtgcttcaccggttttatagccggcaaacaataaaatcaagcaggccgcgattgccgccatgatgatgattctttttcgtgtcatcgcacgctgataccttgccgccgggtcggaagctcgttcctcgtccgcccgcgcgccgcaatgcttgcaatacagcgcattttttgttcgttcccttccacattccttgcaaaaatccatgactttcctcccatcaaacaaaaacacaattagtcattttatactatatttatcgtaagaagggatttaatattaaggccgcatcaaaaaaagccaaacgaatgcgctgatccgtttggcttttttgatcattttaaaaagtatttttcaatatcatcaagcatcaggtttgctgcaaggacgccccctgctgtattccagatggcatcgctcactttatggacgtttccttttttggagacgtttaagtttttaaagagcggatcattgacatagtctttctcaatggcgcttgctttgtcatcgcctgtctcatacgtgtaataaaaaagcacgtccccgtccatatcaggaatttgttcctttgtcacttccatttgtccgagatcgttggcttcctggcctttaggccttgcaaaaccgagctgatccaaaatcgttccggcaaatgatcctttgtgatagatgcgggtatcagcatctgtaaagcggacgagagagactttttgtttcactttatcgcctagtttttcatgaatgtcttcaacgcgcttgtcaaagtcagcgatgactttttcgccttcagcttttttattgagcgcttcggcagtaagcttaaagttgtttttccattcccctgacaatgtctcggcaaatacggtcggcgcgattgctttcagcttgtcgtatacttcttcttggcggattttgttgccgatgattaagtcaggcttcaggctcgcgattttttcaatattcggcgcagcctccgttccgacgttctctacgcctttcattttatctttaatatggtcataccatggatctcccagccaggattgaacggcgccgacaggttttacgccaagtgcgagcactgcttctgtcgcttcattcgtgagtacgacgacttttttcggagtgccgtcaattgtcgctgttcccattgcgtgctttacagtataggaatctttgctgccgttcttctccgcagattgatctttatcttgatttccgcaggcggctaataaaaggataagcgcagcgaacagtgcaaaccatttaaaacgtttcatgatatgtaggatccccttttctcaagtgattttcattatcaattagattatataatgaatcaacctaaagtcaatatgaaattcctatatatctgttttggattgtgctaaaaaccgcttttgagctgcatccggataaagaaaaccctgctcggcagacactgtacaatgagcatatcgtcttcttacgaaaaccgggatgatcctccttctagacactttgaattcattaggttaacataatcttgtatgaatatgttttttttaccatagtaaggaggggtgatttgactaagtttttattgagtggtttctaccttttcggacttgtcatgctgagcaattggtcgatttcttttggtgaaatatttggagccggcaattcagccgtttttcaattatcggaagcggtgctttttacgtttatcatcgggtgctatacaggtcttcctttgatttatgccaaattcactagatctgaaacgttgttttttacaaatcaaaaggtcttcctcatcaccttaggattaggcgtgctgctttcctgttcggcttacagccttcagcaagccctctctcccatcgcgattgcgctgttgtcgatcattggttttttgatcgttggcatcagcggttttcttcccgcctggtttctgaagcctgcgaaaaatctgcgataaacgggtgggtttttcttaggctgacggggtgttggagccaaggtcgaactcagtggtttctataaacggcgctggtcaatatggtgctctgagaaaatcacttgccaatgcgtaatctgacgattgattttttaaaaaacaacatttgctttcgccatttacaaattaatgaaaattctttatgatatagatatctaagtaaacatgttgcatatactaaaaagaccgaagtgctccaacacttcggcttgtacaaaaagccggcccttcgaaggggcttgctcagattgacctaaaatagaccactccctatcactttccaggctcaaggggcggtctatttttctttgttctctgacaacatggcaatcagcatgccaaaagcaatcattaaagagattgtttcatatgctgtcatttttatcaccccctttcagaaggggatgagcaagacttcccttgagtgagcaaagctttttatacgaggtagattataccatatcaaggagaacataaaattagggaaaaaacctttttcactcatgaaatctagcttttccgccgaattgcttcgacatcgactaaattcttggtctttcagctcatttattgattgaattcattagcttgaagaagtattcacgttgaccggtcttattgagttgataccatgaatccaatgtatccggtgcaaacacgtctaattttttcagcacttcccttgcgaattcgagaggagccgctcctgatgcagtaaccagattcccatttgataccgcgggtcccatctcataaaacggttctcctttataatgaggacagaccattttcatataggccaagtcattgcttgtatgctttcttgaatccagatatccgctattcgccagtcccgcagttgcacctcatattgcggcaaccatcgcgccaagctctaaagcttcgccggcctttttcaagatcggctgatgaatcttttctccccaagtattccctccgggtaaaatgattagatccgcactctcgggcgtccactcatcaagggagatatccggttttatgcgcagtccacccatcgtcgtcaccatttctttattcactcctattgtcatgacttttaaaggtgccgcatcttttttgaaatatcttcccgagttcagttcggccattaaatatccatattcccaatctgacattgtatggaatgcataaagatatactgttttcgactgcatccagtaacactccaatcgcaattgatacagcctattataatcaaaaaccctgacagcttttgtcagggtaaaggaaattcagctttcacatttaaaagaggttggccgcatctgcagccaacctcttttttatgcttacttattcaagttgtagaaagattgaataccgtggtattgcgcagtttcagccaattgatcttcgatgcgaagaagctggttgtatttcgcaacacggtccgtacgagacggagcacctgttttgatttgtcctgcgtttgttgccacagcgatgtcagcgattgtgctgtcttcagtttcaccggagcggtgagagataacggcagtgtagcctgcgcgtttcgccatttcgatcgcatcgaaagtttcagtcaatgtaccgatttggtttactttgatcaggatagagttgccgacgccgtttttgattccttcagcaagctttttcgtgtttgttacgaaaaggtcgtcaccgacaagctgaacttttgagccaagacgctcagtcagaagtttgtggccttcccagtcgttttcgtcaaggccgtcttcgattgagatgattgggtacttagaagtcagctcctcgtaccagtcaaccatttcagctgacgtttttacaacgccttcgcctgcaagatggtatttgccgtcttctttgttgtagaactcagaagatgcagcatccattgccaatttcacttcttcgccaggtttgaatcctgctttttcgatcgcttcaacgattgtttgaagcgcttcttcgttagatccaaggtttggagcgaatccgccttcatcacctacagctgtgttcaagcctttttctttcaagactgatttcaggctgtggaaaatttgtgctcccatgcgaagtgcttcgcggaagttttccgcaccgacaggcatgatcatgaattcttgaatgtcaacgttgttgtccgcatgctctccgccgtttacgatgttcatcatcggtacaggaagcgttttagagttgaatcctccaaggtattggtatagaggaatctgcaagaaatccgcagctgcgcgggcaacggccattgatacaccaaggatggcgttggcgccgagcttgcctttattttcagttccgtcaagttcgatcagcaatttgtcgattgatacttgctcagtcacatcaaagccgataagctcgggtgcgatgatttcgttcacgttgttaacggctgttaaaacgccttttccaaggtagcggtctttgtcgccgtcgcgaagctcaacagcttcgtattcgccagtggaagctccgcttggaaccagcgcgcgtccaaaagctcctgattcagtgtatacttcaacttcaaccgtcgggttaccgcgggagtctaatacttcacgtgcataaacatcaacaatgtatggcatgtttgtttctctcctttaatgcttatttttgaattaatgacgatcctgtcatttctttcggtttttcaacacccagcaagtctaaaagagttggcgccagatccccgaggattccgccttctcttaatgtcacgccttcttttgtgacgatgacaggaaccgggtttgtcgtatgtgcggtgtgcggcttgccttcttcggtaatcagcacgtctgcgttaccgtggtcggccgtaataatcgcgtagccgccttttgcaagaatcgcatcaacgacttcgccgaggcactcgtcaaccgcttcgattgctttgaccgtcggctcgacttttcctgaatgtccaaccatgtcagggttggcaaagttgaggatgatcgcgttatgcttttcagcctcaatttctttgacaagcgcatcttttacttcatatgcgctcatttcaggtttcaagtcatatgttgcgactttaggcgagtcgattaagattcgctcttcgcccgggaacttttcttcgcgtccgccgctcataaagaatgtgacgtgcggatatttttcagtttcagcgatgcgaagctgcttcagcccgttttgggataaaacttcgccgactgtgttgtcgagattgaccggtttgaatgccacgtatccgtcaaccgtttcactgaaatgtgtcaagcaaacgaaatgaaggtttttcggatgcttgtctccgcggtcgaagtcgcggaagtcgtcattggtgaacgtgttggaaatctggatcgcacggtcgggtctgaagttgtagaaaatgaccgcatcgttgtccttgattgtcgcaacaggttcgccgttttctttcgtaatgacggaaggaatcacgaattcatcgtaaattccgttttcataagaatctttcacgacatcgagcggattttgatatttcggtccctctccgtatgccatggcgcggtacgctttttcgacgcggtcccagcgcttgtctcggtccattgaatagtagcggcctgacaatgttgcgatctcgccgacgccgatttcttcgatttgatcctgaagctctttgatgtacttctcagctgtttgcgggcctacatcgcggccgtcaaggaagccgtgaatatagacgttttcaacgccttcttttttggcaagtttcaagagtgcatataaatggtgaatgtggctgtgcactccgccgtcagacagcagtccgaacaagtggaggtttgtgcctttttctttcacgtgcttcatcgctgcaaggaatgtttcgttctgttcgaattctccctcgcgaatcgcaacgttcacgcgcgtcagactttggtaaacgatccggcctgcgccgatattcagatggccgacttccgagttgcccatctggccgtctggaagacctaccgcttctcctgaagctgtcagcgtctggtgcggatacttgttccaatagcggtcaaagttcggttttttcgcttgggctacggcgtttccgacggtttcgtcccttagtccaaacccatctaaaatgatgagcgcggctaacttgttactcatattgacctgcctccaataattgcacgaaagactgcggctcaaggcttgctccgccaacaagagcgccgtcgatatcggattcggccatatattctttaatgttcgcaggttttacgcttccgccgtactgaatgcggacgctgtctgctgcagtttgtccgaactctgatgccacggttttgcggatgtgcgcgcatacttcgtttgcatcttgtgcagttgaagacttgccggttccaatcgcccagatcggctcataagcgatcacggaagcagctacctgttcagttgttaaacctgcaagtgcttttttcacttggtctgcaacaagctcgtttgttttgtttgcttcgcgctcttcaagcgtttcacctacgcagatgatcggaacgatgccgtatttaaatgcagcatgcgcttttttgttgaccgtttcatccgtttcagcaaacatttcgcggcgctcggagtggccgatgacgcagtattcaactccaaggtctttcaaagccgcagggctgatttcacccgtgaaagctccgctttcttcaaaatgcatgttttgcgcgccgactttcagatctgtgccttttacagctgatgtgagcttttcaaggaacagtgcaggcgcacagacaacagcttctgctttatctgctgcgggaatggaagatttcacttcttcaacgaagctgacagcttctgaaagcactttattcatcttccagttaccggctataattggttttctcatgtgctccactccttatgctgtatattttgcttacttgtcgttcaatgctttgacgccaggaagttcttttccttccataaactcaagggaagctccgccgcctgttgaaatgtggctcattttgtcagccaagccgaacttttctacagcagctgcagagtctccgccgccgatgacagagtatgtatcatttgcctctgctaatgcttcagcgacagctcttgttcctttagcgaacgcgtcgatttcgaatacgcccatcggtccgttccaaacgacaagcttgctgtttttgatgacgtcggcatatgtttttcttgtttcctcgccgatgtcaagcgcttcccagtcgctagggatttcgcttaccggcacgattttcgtgttggcgtcgtttgagaaatcgtcagcaacaagcacgtctgtaggcatgtagaagttcacgcctttttctttggcgcggtccatgaaagatttagccaattcaattttatcttcttccagcagggattttcccacttcatggccgagcgctttgacgaacgtgtaagcaagaccgccgccgatgatcaggttgtctactttctcaagaagactttcaatcacgccgattttgtcttttacttttgcgccgccgatgatcgctgtaaacggacgttcagggtttgacagcgctttgcccagcacttcaagctctttttccatgaggaagcctgcaacagccggaaggtgttcagcgatgcctgctgttgaagcatgggcgcggtgagccgctccgaatgcatcattgacataaacgtcagccaggtcggcaaacgctttagaaagctcaggatcattcttttcttctcccggatagaagcggacattttccaatacgagaatatctccgtctttcatttcggaaatttgcgctttgacggcgtcgccgtaagcttcatccgcttttttcacttctttgccgatcagttcgccgaggcgtgcggctaccggcgttaagcgaagctcttctgacacctggcctttcggacggcccaagtggcttgcaagaagaactttcgctccctgctctgttaagtattgaatcgtcggaagtgcggcgcggattctcgtatcatccgtcacttttccgtccttcatcggaacgttaaagtcaacacggcagaaaacaacgcggccttttacatcaatgtcttttactgattttttgttcatggcttttaggagatcctccttttaatgttttacaagcctgaaaacggaaatccccgggcggcttaaaggcgccgatatggaaaaagggaaagggagtgtgtgtccccttcccttgtccgctttcattatagcgcttctctcatcaagaaccaagtctgattctggtttccggattaaagaccttgttttgcgatgtaagcggcaaggtcaacaacacggtgagaatatccgctttcgttgtcataccaagaaataactttaaccatgctgccttccataaccattgtagaaagagcatcgattgtagaagagtttgtattgccgttgtagtctttagatacaagcggctcttcgctgtagccaagaacgccttgaagttcgccttctgctgcttctttaagcgctgcgtttacttcttctgctgttacttctttgtcaagttcagcaaccaggtcaacaagtgatacgtttggtgttggaacacgcattgctccgccgttcagttttcctttcagttcaggaagtacaagggaaacggctttcgcagcaccagttgttgtaggaatgatgctctcagctgccgcacgcgcacgacggtagtctttgtgcggaagatccaggatttgctgatcgtttgtgtaagagtgaacagttgtcatcataccgcgtttgatgccgaatttgtcgttcagaacttttgcaaacggcgcaaggcagtttgttgtgcaagatgcgttagagataacatggtggttagccgcatcgtatttatcttcgttaacacccataacgattgtaatatcttcttcactcgcaggagctgagatgataacttttttcgcgccggcttccaaatgtttcgccgcatctgcgcgttttgtgaagaaaccagttgattcaacaacgatttcaacaccttgctctccccagcttagtttagaaggatcgcgctctgctgtaacttggattgtttgaccgttaacaacaaggttgcttccgtcaacagaaacctctgcgtccaattttccatgtactgaatcatattgtaataggtgagcaagcatgttagcgtctgtcaaatcgttaactgccacaacctcaacttcaggattatttaatgctgcgcggaatacattgcgtccaatacgaccaaaaccattaataccgacttttactgccatgatgatttcctcctttaagtaaataagagatatttaatttatattgagggaagaagcttcccttaataactgttttgcggctccttcatcagtgatcaaaaccgtattgcgcggctttttgaagtatgcctctatggcgtcagcttttgacgagcctcccgccaccgcaatgatgttcgggatcgaatcgagatcctcaagctggatgcctacgctgtgcactttgtgaatgacttccccgtggcggtcgaaatagtagccgaacgcttctgcaactgcctcattttcttctattttcttcaaatcttcctttggcgtatttcttcgttctgccattgttttagcatccccgattccatgaatcaccatactggatgattgaatcgtctgaagcacttctttaatagaaggttcctcaatgatagaagaatatgcttctttgctcagctgccccggcacaaataacagtttgtatgtaccggaagctttctcggccatatgggcgcaaatcgtattggcctgattcctgacgttttcgcccagtccgcctcttgccggaacaaaaagcagcttgcggtttttcgagtcaggcgtcatcatttctgccacggcctcaagtgtcgtacctccggttacggcgacgatattttcccccgtaaacctatttttcatgcatgcgacggccgctctccccatctcttttttgacccatggggactggtcgctgtctcccgatacaatgatgacttcgtcgaggttcaacctctcttttaatgtattttccaaatgagttaaacctaaaacgtccttcatcgtatcttcgagaactttcagcaggtcggatccttcaggtgtcaatatcatgccggttgttttaatctctagtagattttgttcttttaaaaactgaacctccgcccttaaaatccgctcgctgatgccgaggctggcagcaaggcttcttctgccgatcggttcagtcagccttatgtactgcaaaattttgtaccttttctgcatgacatcgagaagatccggcaataattttttctgagcctgtattagttgattcatgccaaaacgttcctttcatctcatcctggacgaataatgtcccgcagtgactgaaaacgtcccacctcagccaaaaaaaattactcctgcttacattccttattgtaacagggttaaaatgtttattcaactgttaagaaacaattcatcgacaacattcgcgcgaacgttcacacttctgttttaattattgttcctgataatttctatattatacatatttcataaaaacgtgcctcaatgaaaattagcccttttatttcatgcaaagctgttcgatttcttccaggcatttttctagattatattgtagctatttcaaaaataaatatattgctaaaatacgtacttaccagcaaaaaagcaacgggcggtttttccgttccgttgcttttttgcgtttatccgtttttccatacatctgcaatgatttcgaacgagcgaagtctgtcagcatggtcaaatgtttctgaattgatcatgatctcgttcgcctgagtcgtccggatgaactcttcaagcttttctttcacactgtccggcccgccgatgatcgttgagctgagctgctcgttcaccatcgctttttcgcgcggcgtccaaatctgttccatatcatctacaggcggcttaagctgtgtcggagcgccgcggacaagatccaaaaacttctgatagtgcgacgttgccaggcgctgcgctttcgcatccgtatcggctgcgataacggtaaccccgaccatcgcataaggctccttcaagacgccgggcttaaacgaactccgatacagttccaaggcaggcagcgtattggcgggcgaaaaatgagccgcaaatgcaaacggcaaaccgagctccccggcaagccgggcgctgaatccgcttgaaccgagaagccaaatcggcacatcaagcccttctcccggtatggcgcgcacatgatttcttacattgcccgacggcttaaaatattgccgcagttcttcaagctgctcgggaaaatcctccccgctgcttatgtttcttcttaatgcgcgcgctgttaattgatcagtgcccggagcgcgtccaagtcctaaatcgattctgccgggataaagggattcaagcgttccgaactgttcggcgatgacgagcggggaatggttcggcagcataatccctcccgagccgatgcgcattttcttagtacctccggcgatatagccgatcaaaacagaggtggccgagcttgcaacaccttcgatattatggtgctcagccagccagaacctgtggtacccccatttttcggcatgctgcgccaaatccatagattgtttaaaagattgttccgcatttccgccttgtacgataggagacagatttaatacggaatacttcgtatttttgaaatgctgttctgacattgtctttccttcttcctgaagtgtagtggtcatgtaattagacgataacataatcgtcccggtgaataaaagaaattagttcgaaaaaaatcgaactaatgtataaaaagcttgcctccgctgggaggcaagcccttttttaagaagcggccgtttggccggctgtctggtttcttcctttaaagaaataagcagcgctaatgagcaaatagatccccgccgtcaccaatgtaatgacaatcgacgtggtcaggatgacaccgatcagtatggctgtcagcgaaatgattgccacccaagtcgtataagggaaccatttgacatagtagccgtttccagctgtttgattccgtttcctcgattttaaatgggcggcggcaatcagcatccagatcacaaggacggtatagccgagagaccccatcaaatattcaaacgtttggctgccggcaaatagtgaaaacaatacgcccaagtataagaacgaagtgcataatagaatcgaataaaccggcacctttctcgcagaaagcctcgaaaagattttcggcattcttccgtctgacgcctgtgtatacaaaatacgggaggcgccgtaaagccctgagttcatagaagaaatgaccgccagtaaaatgaccgcattcatcaaatgatccgctccgggaacgccgatcatcttaaagaccatgacaaagggactctccgacaccccgttcacttgattccatggaatcaagctgacgatcacgaaaaacggcagaagataaaaagcaataatgcgcgttaacgttccccgcacggctttaggcacaaccttctcaggatttttggtttccgccagggtcaccccgataatttccgttccgccgtaggaatagatcacgacaagcatggctgtaatcagccctccggcgccattcgggaagaagccgccatggtctgtcaaatgagtaaagccgacagccgaatgttgtccaaaagagaaaaataacaagataaatccggatataataaagacgacaatcactgtgattttaatgagagcaagccagtattccgtctcggcaaagcttttgacagaaagcaaattcacgctcgtaatgacgagtgaaacgaacagcgccagcacccaaatcggcagccccggcagccagtactgcaaaaacatcgcggcgacaacagcctcagccgcaatattgagaacccacattttccagtatatccagtccaaaaaataagcggcatacggccctaatatcgattgaaccagatccctgaatgttctggcttcgctgtttcggacagccatctcggccagcccctgcataataaacagcaaaatcacgccgccgatcaagtaggggatcatgaccgaaggccccgccaaatcgatcgctttgctgcttcctttaaataatcctgccccaatcgctccgcccaatgccatcatcataatatgccgcgatgtcatcgtgcgctcgagcttctgcatgtctttctccatctatgttcacttcctctattaaaataaaaaagctcaccgtctccctcttcaatttgaagataaagagacgatgagctttgaagcttaccgcggtaccactctttttgatcctataccaagaatccagctttgcgaagcacagccatgctgtgcaaacctgttaacgaaggttaatcgtaaagtcctcaggaattgatgtccgtcctttagccagtccactcccgggcgagttcaaaggttcattggtctgcgtctcacctacccgcagctctctttgccaatgccgatcttttactgctcccgttcattgtgttttcttctgcctgaaatatattcatataatatacgtgccgatcttcactttgtcaacatcaaatccgatgccaaaaaataaaaattaaaatttttctcttttttcaaggaagatcgccttttctattggaaaatgcaagggcagatatgcacaactttcataatgatagagcatgaaccaaaaaaggaaaatgtaaaaatcggcagatatcccccgaaaaaaatagttaaattgaaatattattcaaactttacaaaatattttaacgatgatagagtgtgaaccgaatcataacatcagctaaaggaggaagagaacatgaaaaaactcttgtttatggtgatcttgtccgtattgacgctcgtctttggttcatcgtccgtaagctttgcgaaggacattcctgaagacaggtatacaacacctacagatgctgaatttagccagattaaagagattttaaacgaggctgatgtcgaaaccggcaatttgcagaaggattacggtgtgatcgtcaatgatcctgctgaaaaggtcggcgtcatatcggacattcctgccgaaaaagatgactggagccatgtcagcttccattcttactatgtcgacctcaacagcggcacactcattgctgatgttcaatttgaattcacgcaaaacgatgacggtacatcagaaaccgagtacaaaaacgtaacaaacggaggcaggtacttcgtcaaaatggatcaagacggaaatgtcattgatgaagcaacaaccggcgacatgtcgattttgtggaaatactagaaaccgagccgccccttatggaaaacgcctttattcaaaggcgttttttttggtcgtatatttaatggatctatccggtggcgccatacgggtcagcaagattaaagacatgaggcccgaacaatgccgaactcatgcctgtcaaaatctttctggaatattagcccaccatagtgtcaagacacaacgcgttcctccgagctgtcgataaagatgtcttcaagcgacggttcatcgacgtggattctgtagattcccaccttgcagttcgttaatactctgacgatggcaggaattttttcttctgaattgacgatgatcgaaatctcatggtgcttaaattgaacgttttcaccagctgactcaagaaatcggtcgatcaggccgaaatgctgctcgggaatattcgaatggcggatgtgaacgcttatgttcgacatgaaatgccttcttaactcatcgagcgtgccttccattaaaatgcggccgtttttcatgatcgcgattcgtgtacagattttctcgatttcatgcaggttgtgtgacgtcataaataccgtcttaccttctttttgcaaatccataatcagcttttgaatgtggagtgccgattcggcatcaacacctgatgtcggttcatccaaaaagatgagctcgggatcatggatgatcgcttgggcgatgccgagcttttttttcataccgaatgaatacgcgcccgcttttttttcagtatgctcagtgaaccctaccctctctaagacttcttcgcaacgctcagtcgatacggtccgtccgttcagctttgcaaaatacttcaaatgcccgaccgctgtcattgaatcatagagggtcaaataatcgggtaaaacgccgatgcggtgcttgacgctttcaatcgaagcttcatttaacagcagaaaactgccggctgtcggctggataatgcctgtgatcatattcataaacgtagatttccccgcaccgttgcggccgaggaatccgtaaatctctcctttttcaacttgaaggtcgacatggttgacgacggttttggcgccgtagcttttcatcagcccttttgcctcgatcaccacattcattataaatctctccttttaaacaaaacgatcgcaccgcaaagaacgatggcggcgtagacaaagttgatgaaaataaaagaaccgcccagtacggagtaatagtacggcgttatatatttaaaccaggtgatcatgccgttctctgaataaacagcccataaactgaccgctggaaaaacgagagcaaacacgattccgaaaaacattgacacggcgggccttgaaatcacgatcgaaaataaaaggttcaaagagatcgcagctgtaagaaaagccatgctgtctgcataactcagccataaaaactcttttgaggcgatcatcaccaaggcataagaaacgagcatgcagaaaaaccaaaacagccagacgccaagaaactttcccagaatgatcttgatccgcgacgttttcgtcacgagaaatctgaccgtccgggtatggacttcgcggttgatcatgtcatgggaaagccccgcgataaacaggaaaccgagagcaaacacgataacggccgttccgatcgcgcctgcatcgcttcctaaatccaattcccgcacgacatccgcaggcgcctgttcaatcaatcccgcagtcttatagctcacccaaaacataataataatgacaataatcgacttgatgcttttaaaaagactgataaattcgttcagacacactgcccgcatatgagtcactccttcactattctccattatagtgagtgaacattatcgggaaataatcttatccttaacattaccttaaattttaatagactctttctatcaggggtgcttctgtggattataaatgagataaaaaatctcgcaagcggcttggacctgcggcagaaatgtgtatgcagagccggcgatccgataaaaataccattttaatatactatttataatcggcaaaaaaagcagaacgatgcgttcaatctgtatgcgccggaattgtcatatcgcataataaaaaagattagctcagtatgaagctaatctttttgctatcgataattaccggtcctccacgactatatatgccgcctttacggggccgtggacgccgactacaaggtccatttcgatatcggctgaattgctcggtccagtgacatagttgatgcaggacgggatgacttcgccgtctgcaatcttttgtttgatgattgcgcttgcttgtgtcatccgcgggacgatggtgcttttcgggacgatcgcgatatatgtcgtcggcagcaagctgacggaacgtcctttgtcttttgagctgaagaggacgaccgttccggattcagcaagcgtgatctcgctgaatgtcacgccgatgttagcctgttcggctcgctggatgttctcatctccggccgctgcatcccattcccacactttcgtcccttcattcggccacttgtccgttaacaggcctgacagtccgtactctttaaaacggtcatctttcgggatcatgacaggcccgcctccaaatcgcgctgcttgttcatacaaggcatcatgcaagccgatgacatctgtttcaatcagctccgtgtgaattttccggcagtggtcctttaagacgccgacaagctcatcctgtgtatagccttgatataccctgtgctgcggctggtggatataatcgggaacggtgacgcctgcagaacgcctgttgcggccgagcctttcagcaatccggtttaaaaagccgtctttgttgtggattgttccgtttgtcatttgtcttcccccttctctttccgtctgtcctcaaaccagtcgcggaaccttgacttgttcggcgcggggaagtcgcgtatctgggtccactgttttaacggacccggtcccttcgtaatcttgccgtcttctttaaacggcttcatggctgccggcgcccatttggagcccattttgtaaagggatggcgcagaagttcccaagccgaacgctttcatcgccagcttttcggatatcggcgcgcgcccttctttttcaacgatgcgctgcctgtgctttagaagcagctcatgaagcgggattttcaccggacatgcttcagagcaagccgcacataacgaagatgcgtacggcagttctttataatcgtcatatccgccgagcagcggcgacaatacagccccgatcggacctgaatagatcgaaccgtaagaatgcccgccgacatgacggtaaacggggcagacattgatgcaggccgcacagcggatgcattgaaggacggactgaaactccgttccgagaatgttggaacgcccgttgtcaacgatgacgaggtgaaactcctccgggccgtccgcttcaccgggcagcctcggccctgtcagcgccgtgatatagctcgtcagccgctgtccgaccgcgcttcttgtgagcatgccgacgagaacttcaaactcgtcgaatgatgggacgatccgctccatccccatcacggtaatctgcgtcttcggaatagtcgtgacgagacgtccgtttccctcgtttgtgacaaggctgacagatcccgtatcggcaattgcaaaattgcagcccgtaatgccgatatcagcttcgagaaatttctttctaagcacggcgcgcgcgtgcatgacaagctcttccggcttttcggtgttgcggtagccgatccgctctttgaagacgtcgcggatttgctctttgtttttatgcaaagcaggtgcgacgatatgtgacggcggatcatgatcatcgatttggaggatgtattcgcccaaatcggtttcgaccacttcgcagccgtcgctttcaagtgcctcgttcatgttgatttcttcggtcaccattgattttgatttgacgatttttttgccgtttttctttttcacgacatcgcggatgtagcctgtcgcttcttcagccgtctgcgcaaagaaaacgtgcccgccttttttggcgacattttcggcaagctgttctagatagtaatccagattttccagcacgtgctgcctgatttcttcggccagagaccgccattcttcccagttcccgagctcttttgccgcctcaagacggcgcgctctcaagcgctcctgcgcgcttgaaacggcccccctcataaactcgttgtcgagcccgtctgacacgcgctctttaaatttctgcgttccgatcttcattgccataacgaatgtccccctctatctgtgaaatgaccggattgtctgtttatctgctgttcagcacttctgcgatatgcatgacttcaatcggcttgttctttctcccgatccgcccgccgatattcatcaagcagccgcagtccgccccgattaacacgtcggcggctgtttcttcgacacacgccactttctcatcgaccatctgttcggatatttgcgacatcttcaccgagaaagtgcccccgaatccgcagcagtcgtgtttgcgcggcagcggcgtgaactccagtcccttcacatgccgaagcagcttcatcggcgcgtccgtgactcccaaaagccttgtcatatggcatgacgtatgataagtcgcctttttctcgagtgtcgccccgacgtcctcaatcttcaatacgttgacgataaaatcggtcagctcatacgttttgtcagccagccgctgcgctttttccgcccaggccggttcatcccggaaaaggtgcgggtactctttgaacataaaagcgcacgatcctgaagggctgacgacgtattcagctgattcaaacgtctcaatcatccgtctcatcgcttttttggaatctttgacatagccgctgttgtacgcaggctggccgcagcagatctgcccttcgggaaaatccacttcacatccgagccgctccagcagttcaacagtcgcttttccgacatttgactgaaacatgtcaaccaaacacgtgataaacagtgatactttcatcttgatcccctctccaacccgattaatcaggtcatctgatgacttggttagaaaaccctctttctccatcttacaccttggcaaaattttttgaaaggggtttctttttcgttttcactcaggccgtgcagctgactgctgcttaaatagccggctcgtcggcttgtttcgtttcttcaaaatatgaggccagcacattttccacatttgtcagatgattgtgcatcgcttgctccgctttttggccgtctttttccttcacagcctgatagatggcttcgtgttcctcataaaggcgcttaacagttgtattcttcgagaacagccaaattttgcgcgtctccctcatcgtctcaattaagagagatgacacatgattcatcaagcctttcagcagatcgttctgcgaagcgccggcaagcgcaaggtgaaacgcgaggtcggctttttcgccaagttcgccgttcccgtccgccagcttcatatcctcaagtgcttcctgcatgcgtccgagatcatcctccgtgcgtttttgagccgcactggaaactgccccgatttcaagtattttacggacttcgagcagttcagcgacatctttctttttcatcaaaagtgcagccgaaagggggatggaaatttgctcaggctcaaaccttttcacatacgtcccttccccctgcttcatttcgaccatccccatcgcttttaacgcggacagcgcttcccttacggccgaacggctgacctgaaagctgtcggcgagcgcttggacggagtcaagcttgtcgccgggctcaagctctccgcttttaatcgattcaagaagcgcttccgcgacttcttcatatatttttttcgtcttgatttgtttgtatttcaacttttttcacctcgtaaccagactgggcatgatgcgctattttttattataccgttctttccgtctggaacatatagacttcggctccatgcaaaaaaagattgtaatttatgacattgagaaatataatgctaaatgatcagtcttatcatcatgtcatcagatgactagatgaggcttttttgacgaacaaagggggaattggagatgggatggacgcaagattatactccgctggggaacagtttgctgctctcttcgcttgcagcgcttataccgattttgtattttttctgggctctggcaatcaaaagaatgaaagggcatacagcaggcttgacgactttgctgatcgcactcgtgctggccgttttcgtatacggcatgcccgctcagcaggctgtgatgtcggcttcgcaaggcgcggtttacgggctgctgccgatcggctggattatcgtgacttcagtttttttgtacaagcttacggtgaaaaccggccaatttgaaatcatcaggagttcggtattgtcgatcacagatgaccgccgtttgcaagcacttttgatagcgttttcattcggggcatttttggaaggtgcggcaggcttcggcgcccctgtcgcgatatcggctgcattgcttgtcggcctcggctttaatccgttgtatgcggcgggcatatgcctgatcgccaacacggcgcctgtcgctttcggagcgatcggcatcccgattatcgcggttgaagggccgactgggattcctgcgatggacatttcaaaaatggtcggacgccagctgccgtttttatctgtatttattccgttttatttgatcatcatcatgagcggtttcaaaagggctttggaagtgctgccggccattctcgtgtcgggcgtctcttttgccgttacacagtatgtaagctcaaacttcctggggcctgagctcccggatattttgtcagctatcgtatcgcttatcgctctcgctgtattcttaaaattttggaaaccgaaaacgacattcagattctcacaagaaaaggaaatggccgctgcagcggaggcgcagcagcttgaacatcaaaaggcctcatactcggcggggcagattttcaaggcatggacaccgtttttgctgctcacggcaatggtctccatctggggaattccatctgtcaaacaggccttgacgggccattatgaaggttcaaatccattgctgctgttcataaatgatatcggcggcaggctgacgtttgcacccggcgtgccttttttgcacaatcaaattctcgatggttccggaaaaccgcttgaggctctttacaaacttgatctcgctggatcggcaggtacggcgatcctgattgccgccgtactgacaaagtttgtcacaggcatgccttggaaagaatggggcgccgtatttacagattcgctgaaggaactcggcaagccgatattaacgatcgcttccgtcgtcggttttgcctatgtcaccaattcttcgggcatgagcacaacactgggcatgtcccttgcgatgaccggttcaatgttcgcattcttttctcccgttctcggctggctcggtgtgtttataaccggttcagatacgtcggccaatttgctgttcggaagcctgcaaaaaatgacggcacagtcagtcggaatggagccggtgctgtctgtggcggccaactcttcaggcggcgtcacaggaaaaatgatctctccgcagtcgattgcggtcgcctgcgcagccgtcggactggcaggaaaggaatccgacttgcttcgctttacactgaaacacagtctgtttcttcttttcctcgtttgcatgatcactttcctgcagcatcatctgttttcgtggatgatcccgtaaaaaagccgccggcgctcgtgccggacggcttctttattgatatctctttcttacagacgaaggcagtatattgagctgatcacggtatttggcgacggtccgcctcgatatgacaacgccgtgcttttcgtttaaaaggtcggccagtttctgatctgaaagcggtttcattttatcttcttcatcgatcagccggcgcagatgcgctttgactgtgtgacttgacgcatgcccgtcagcggcgtcctttaccttcgccgaaaaaaaccgtttaagctcgcaaagctcaaaaggcgtctgcacgattttccctttgactgcgcggcttaccgttgattcgtgaacgccgagggcatcagcgatctcttttaatgtgagcggcttcagttcgtctttcccttttaaaaaataatctttttgccgcaccatgatttccgccatcaccctccgcatcgtttcccgtctttgcctgagggcattgtcgagccatttccactgcttgaacttatcagagatataagcggtcgcctcgtcttttgactgacgctctaaaaacggctcgtaaaacgcgttaagctggatgtcgggaaaagaacggctgctgagctcaagcaccaattttccatcctctgctgaaatgattaaatcaggctcgacatagacttcgccatcatctgtgccatatatcaatccgggacgcggcgacagttctgcgacaaggtcttgaatgtcctgaagctctgaaagcgaaagccccgctctctctgacagctctttccatccctttttggcaaacaggtcaaagtatgaggaaatgactttttccgcttttgccgtctccttgggcagacgctttaattggatcaggatgcattcctgtagcgaccgcgccccgatgcctgccggatcaagagtctgcagcttgcccaagacttcttcagcttcttctctggtgacagccagctcggaagcgataaaggcgatgtcttctgtcacatatccgtttggatcaagtgattcgaccaaatagctgaaaacccgcttttcgcggcttgacagctggagatcgagcgcctgccgtttcaaagcgcttttaacatcttcacgggaatgggccgtctcagagcggcttattccttcattttgcaaatgacgattcgttttatggtaaaatgatcggggaatatcggagtcttttcgttcgatcagggggttttccaatgagagttcatcaatccggctgttcagctcggccgacgaatactgaagcatatgaatggcttgggcaagcccttgcgtcaagtgaagttttgccgtttgctgctgctgtacatgcaagttcatcatatctcccctcccactattagtttacacgatcggttccgaaccgtatagacttaaaaaaggagtgttaccattgacagagcttttctccgtgccctatttcatagaaaattttaaaacccatattgaaatgcatccaaatgaggataaaatccacgcgatgaacagctactaccgttcagtcgtttcaacgcttgtgcaagaccagctgacaaaaaacgccgtcgttttaaaacggattcagcatttggatgaagcctacaacaaagtaaagcgtgaagaagcatagcaaaaaaaccgcctgtcatacgtgaacaggcggtttttctgcttctgtctgatggttttgaatcagtttcgtattcgggatgtctttcatccatgtattgtagtaattcgcgttttttccgtaggagttgtcaatcactacgttttcttttccgagcaggcacgataagatgtggccgtgcagccttgaagtaacgactgattcatagcggctgaagaaacggattgatttgtcgacgaggctgtccgaaaagcgtttccaataagaagcgatcggcagcggattgcccgcttttttgttgaggacattgatcgtctgcaggcgtttgattccgcgtttgtcgccttctgataagatgacgttccaatcgtacgtgtccggctcccctgctttctgcaggctgctgttggcttctttgtcggtcctgatcaaccgcagaacggactcggacggcttttcggcaggtgccgcgatcggccagagctggtgagccatatcgggcatcattttgatgtttttcacctcttcgaaacgcttgacggcaaaatcgaatgatgccttttcccgcgtgaataagtgcagatccgggtgagccgccaaaatgccgcgcgtttttattatattttcttcatgctcataataaatcgactgcggcagaatgacgatccggttgtccgggtaatgttcgaccacccgttctctgaactgctggaagtgagggtacaagtcgccgaaattgccgcccccctgacaaacaatgatggcgtcctttggaatgcggcggcccggaatgaaattctccgcattccatctttcgcgcaccttgatgccgtatgcttcaaaaaaagcttccgttcctttcatgatcaatagatccccgacgtttccgtatagcgggtagtccaagtaaacgactgatgaatgccttggaatgacatccaaaatttctgccagcttatgctttaagctgtccatggaatatgtaatcgccatgtttagcacctcatttatatttaatccggtcggcaacgatttgaattacccggtcctgctcttttcgcgtcatacttgatcctgacggcaggcagagcccgcgctgaaataagtcgcagcagacagagccctggtcatcgtgcggataaaaggccgcgcctttaaaaaggggctgtctgtgcaaaggcttccataacgggcgggcctcaatgttttcatttgcgagctgttcgatgatgtccgccggtgttgtttgaatctttgctgtgtctaacgttaatgtcgtgagccagcggtttgacatgccggcctcaggcatgaattctataccttcgataccggaaagcgcctccttatagcgctcgaaaaccgcccgtctggcatgtacccggtcatccagaacggcgagctgtgcgatgccgattccggccagaacattgctcatccggtaattgtagcccgctttttcgtgctgataatgaatggctggctcgcgcgcctgagtggctaaaaagcgcgccttcttcaacgcgtcttcatcatcgctgaccagcattcctccgcccgatgtggtgatgattttgttaccgttgaacgaataaatgccgaagcgtccgaaggtcccgctttttctgcctttataaacagaaccgagcgattcggctgcatcttcaatgacaggcacggcaaatcgatcgcaaatggccataatctcgtccattttcgcgctttggccgtacaagttgacgacgatgacggctttcgggagattcctggcccgctccgcttcgtcaagcgcccgttcaagcgcctcgggcgacatgttccatgtatcccgttcagaatcaatgaaaaccggttcagcctgctcatatatgatcggattggcgctcgctacaaacgtaaaagaagagcagaagaccgtatcgcctttgccgacgccgagcaatttcaaggccaggtggatcgcagctgttcctgagctgactgccgcggctccggacgtccccgcataggcggcaagcttttcttcaaatgtgtcgacaaggggaccgaggggcgcgatccagtttgtccgaaacgcttcggctacatagcgctcctcgtctccgctcatgtgcggcggtgataaataaattcgcttattctgactcatgtttttcaccctttttactgctgttatttgatcattcttgcagggactccgactgcggtgcaattatcaggaatgtcgtgaatcacggctgcccccgctcccgtcacgctccagcgtccgactgtctttccgggaatgaccgccgttcccgcgccgagatgagcgccttccataactgtcacgccgccggttaacaccgttccgggcgaaagatgaacgtaatcgccgatccgattgtcgtgttcgacgatcgcacctgtgttgacaatcgcgtggatgccgacgtctgcatccgcttggatgacgctcgatgccataacaacggcgccgttttgaatccgggccgaaccgctgacaacagcagagggatgaatcaaaaccgcataccggtcaagcggaagaccaatgcgttcatacagctgctgtctgatgctgttttggccgacagccaggacgaacttcgcgtccggatgaagccgcgcaagttcttctgcggcagctgaaggccctcgatacagaccgttctcaacatgaagctccgcataccggtcatcaagaataccggcaagctccgtatccggccgctcttttacaagttcccgaacgactttcccatggccgccggctccgatgatcaccacgttttgcatcaggcattccttctccctgtaaatttttctgctgtcacatgccggtcctggctgacgccttccgacttcaaaacctttacgacagtcaacaaaaggattttgagatcaagcaaaaaagaacgatgatccacataccagacatcgagttcaaatttttcctcccatgtcactttatttctcccgttgatctgcgcccagcccgtgatgcccggcttgacttcgtggcgtctccactgccgcttcgtataaagggggatatactccatcaaaagcgggcgcggcccgacgaggctgaggtctcctttgataacgttgatcagctgcggcaattcgtcaaggctcgtttttctgatcagccgccccgtctttgtcagccgcttttcatcgcttagcagattgcctgctgcatctctttcatcagtcatcgttctgaatttatataatgtaaaaggctcgccattcagccccggacgggtttggcgaaataaaacaggcgagccgattttccatctgatgagacaagccgtcagaatcatggccggactgagcgcgaccagcaaaataactgacaatgcaagatcgaaaaaccgtttcgctagcacgaaaaacgcacccctttcttttatttaaaaaatcccttttgaaacgggaaggatagagaacaccggtatgcttgcagcttcgttgtgacaatgcgccgttccgctttcgtcaacatgacgaaataggcaaacaggccgtaagccaacgtcgcagccagtgccgtgacaaacaaagacagcaggctgacgatcgaaaataagtattgaagagcgtaacagacagccaaagtaaatgaagcgccggcaaccggcccgtatatgcctttataaaagaccctttttctttcacccgtaatctttgatgcataaatcggagtgaagacgacgtttttcagcgttaaagctgccgcaccggccagcgcaattccgtaaaggccgagtcccgccgggccgctcagcacgatggcaagcagcaaattgacaacgccgaaggcaaccgtggtcagcgccggtgttctcagcttgttataggcggtaaagatgtaaaacagcggcgccgggcttaatgaaacaaccaaatagcccgcatgtatcagtaagagccatttcaaatgttcgaatgaagggccgagccaaagcgacagaaacgggccggcaagcccccccagaagcgccgccggcaaagcgagcaggatgccgttaaacctgacggcctgattggcataacggacgagcccttctttgtcgccttttgaataatagagtgtaatcgtaggtgaaaatacggccgctagcgttcccgaaagcgtccgcaacaacagcggaaactgaatgatcgccgcgtacatgccggattcggaaacccccagcatcacattcgccaccattaaatcgatttgcagaaacagcaggatgccgacttggctgacggagctccatcctcccgcctgaagcagttttttgcactttgcaaacgacatatccctcacccggaacgtaaaccatggaatcaatctcttaaagaaaaagatcgacaggatgcacgccgaagcggttgcgatgagagcggcgagctgaatgtgccagatcttcggtgcaaaccacgcgaaaatcaacaatacgctcagaacgcgaatcagcatttggatggcttggatcgtgctcgtaatatagattttattggcgaaaaacggaccggcggcaaaccccgacatcacaaaggtcaataaaaacagcaggctgccgatcaaaagcgcgacctgcacatcccccaaaagaccggcgggaacgcgaatgatctgatcgataaaaaacaccgtgccgccgagcggaaaaaacaagatgactgaaagcaccagtgatgaaacgatataggtattcatatagcctctcgcttcatcaagcgctcccctgtgggcggaaacagaaaaaaaccggacaacgaccgcgctcagggcgaccgtaattatcgaaaagtaattgatcatattctgtgtaagatggacaaatccaaacgcctcaacaccgagggtcttgatgacgtaaggcgtcagccacatcgaaaacagcaccgataataaaaaagacgccatattggcgccgagattcaaaacaaatgtcttattcaaaaggctcatcccttactgggcagatttcgtttaaaaaacaattcgagcagaatcggaatattcagcttgcatagcaataaaacgagccgctggccgattaacaggttgcggttgcggagagacgtggctttgacgcacgactgcaccatccggtaagacaaaatgtctttaatgtgccgcctcacctgctttgaaggcttcggttccgcacaggcattggctaaaagcatcggaatttgatgtttgcatgtgtacgtttccaaatcgtccgcacattcatccaaaagctgaaacgtctcatagaatctccttttcgcccggtactgccttttcaggctttcatccatgtacggtttaaacggcgcctctgtcaggctgtccgggttgcacctgtacatgtagtagccttcatcgatcgctctcactcgtttcgctgcataaaaggcgtacaaattaaacggcgaatcctctgcaaaacgaatgtcttcaaaaaagtacagctggtttttcttcagcaggtcgcgcctgtacaaattccgccacacataccagatgaagcgggtttcgtgcgcctttttgagctcgcgtttaatatcccagctcaacaagaggcgatcggtcggcagcggcggcgggaagtaggcgtcttccgtatcggaatgtttatgatacccgcacatgacgatatcgaggtcgtcttttttggcagcggcgtacatgttttcaaacatggcaggcaatacaaaatcatcaccgtcgacaaacccgacataatctcctgtcgcggcttgaagaccggcatttctcgccgagctcagcccgccgttttttttatgaatcactttcactctggcatccaggctgcagtacgttctggctatctccccggatctgtcgggagagccgtcatcaacaaggatgatttcaatatttttcagcgtctgcctgcgcagcgaatcgacgcattcttctatataatcttcgacattgtacatcggaacaatgatactgataaatggcttcattggacatcacccataattttccgtcttaaatctgcgaaataatgatcccttgccggggtctcacgatgcgagtcaccggtcttgaccagctcttcgattgcgccgagaacctctgccgcatcgggattttccacaagcttcatcgaaggaacgtctttcagccagcgaaagccttcaagcaccttatgatcaaaagagcggatcacgacgcacggcgttcctgttatcgcacaaaaaatcatgccgtgcagcctgtctgtcacgacgacctccgcgcctctcagctgatcccaaagccggttcagctccttctcgcgggacacgcggctgaccctcctgccgatcgtcgttgtaaaagtttttgcaccgccatactcgtcgccgacagccttcagcagctttttacgctcttccggcctgagaaagctttctttatcctcccttaaacaaaccaacacaccttctctttcagactgctgttctttctttaaataaagcaccatatcaggctgctttacaatcgtttggtttgagaagtgctgtttcataaattgataggttgtatcatcgcgcgccatcatgaacagccggcgatgggagttgtagatttttttcgcccttttcagctcttttttgccgcggagcgtctcggaaaagtgcgcagttgccgggagctggacgattttataatgcttgaatgttttgataatgaagcgcctcgtccattcctcattgcggtacaaatcccccatgtttcctccgccgatgatgaataccatatcctcggggtggcggatgcgcatgagcgcttttgcatgtttgtaaatatcgttaatgccgatttcaattaactcaaaatcgggaaactcgttttctatgaatgtgcggcttgccagggcaatcgcatgatctcccaaattatcatgggacggaattaaagtcagaatgatttttttcttgcctttatattgttcaaagcgccttaaacccggcgttcccatcacatattcagaaggatatttcaccttgagcaaaagccattctgcaagattgatcttcagttcctgaaaggtcatttcctcaccgcctatttcttcattctgtgctcgatcattttctggtaaatggccgcaaatccatacactgccggcatcaaccgcaagcgaatcagcataagcaaaagcttcttcttggaatcgaatgccgacatgtccactgcggagattttccccctgaattccggacaggcgcatatgctgcggatatttttatatttttctattgaagggtttttgtttcggctcttgcattcatttaaaatactgatgcagccgtggttgacgataaagacgtgcagcgcctcctttaaagccgggagctctccgtgctttgtcaggcagtccaggtttgcttcataaagagcgagaccgtcttcaaacagccctgcctgatacttttggacgatggacgccaggtggaccctgtaatgataaagcggcttagtcacgaacgccgcggtattcgcatatagaaggcatctgaagctgaaatattgatcttcgatgttttccagctcgtcgcggagcgggaaaacgagcttatgccgctcaatcagactccgcctgtagagcttgttccaggaaaagccgcttactttaccctttaacaaatccttcataaatgcctctttcggctttccttcatagttcttcccgatgtccgggcagaccgttttttcggtatcctgaatttcaacggcataatcacagatgacaagatcggcatcctcatccttcgctttttcatacatagactggcaatagtccggctcaatccagtcgtcggagtcgatgaatgccaagtactcgcctgacgccgcttcgatgcctttattgcggacagcgccgaggccctgattgtcctgctgaatcgttttaatgcgcccgtcctttcgggcgtaatgatcaatgatcttctggcttccgtctgttgaaccgtcattgacgataatgatttcaatatttttcaaggtctggctgatcagcgactgcaaacaattcggcaaaaaagcttctgtattataaacagcgaccagtagactaactgctggattttccaatgtgatgactcctttgacgaaatttttacaagacctaaaatgtccggtctttccgctattcaacgttcaaaaatcgttctgtacggcaataccgacgagtcgaacggcatgagcataaagctgtataagaagtaacagatcaaaatcaaaacataaagaagcgcgtttgatttcggttcaaaaatccgtacaaaataaggaacgagaatcagctgatagagcccgaaataaatgttgaacctcgcaaaaatgacatcctttgtcgccaaaattccgaacaggaaaccgatcagacaaaggtttacgatataatcgacttcgggccagcgctttctgagctgctccctgaagcaaaaggcaagtgcgagcgggagaagaagaacgatgattttaataacgttcatgccgtttgtattcttcatcagccattcttcataatgtccgtattgactgttttcaagcacgactaggaatacggacagaaatttttgatacagaaaagtccccgccaaaaagacgagcatcaggcaccagaggacaggcgaccacgcttttcttctgacgatgaaataaaccggaatcatgatcaatgccgaagaatgaaaaagcgaacagatcagtacaacgatcatatagcgcaccagcttcccatcgatcagataccgcaccgcccaaaacagaatggccgccgccatgtattggcgaatgccgttaaacgaagcataatagtgaaacatgccgataaacagaaacatgctcaattcaaacggccttccatacacataaagcgtcttgacaatatagatataggtaatcgcggcaacgacggcaaacatgagcgccggatcggctgaaatctgatttaaaatccataagagtgcggtaaatcccgggtccgtcgacgacttgcctgttccgaaaccgaatatctcccaaatgctgttgtattttccggctaattcgtaaagcagcatatatgtgtggtaatccgttccgaccttgtatcttaagccggcaacgataatcaaagacgcgagcggaacgacggtgaggatcgcattcggacggtagcccgtcggcagcctgtgatcttccctgccgtacattttcgcaaaccatgaccagacgaaaacaatccccatattcaacatgtagacagccatacactcactgtccttctgctgcggagattgaatagatgtccatcagtctcgccaaatttgcttttgcatcatagcctctctcagcaaggcttctctctatttccggccatgcaggctttttcggctgagcagcacggctgatatcctcagcccaccgttcaaaaccggcatttaagctgagacgttgcagcaggccgagtcccaaatcggtttcttccgtaatgttgtctgatacaatgcaggggagccctgacgcttgcgcttcgaccagtacgaggggtagcccttcaaacaaagacggcatgacaaatacatcaaatgcctgcatgagagccgggatatcttcgacgacgccgagaaacagaatgtcgtcttttacaccgagagcagcggctttttcttccatctgtctgcgcagcggaccgtcacctgcgaacaccgcttgaaaaggtatgcccgatttcttgcaataagcggcaagcccgagcagaaacgcgtggtttttctgttcaaaaaaacggccgacatgcccgatcaccagtgcgtcttctttgataccgaagctctttttcgcattcgtttttgaaacgccgttcgcttctttgaaccggtcaagttcaatcccgttttgcaaaagatggaccgcgttttcacccatcttctttgcgccgaataaaaaacgcccggcatctttgccgcaagcgcacagagccgtagcactggagaaaatcaagcggcggaatgcaagaagctgccatgtatcccaaaaccgggggttaggcttccaggccgtgttgtgggaatggcagaccctgaccggaacgccggcgagcctggccgccaatgcggcaaagcccgtctgaaaatccgtatgagcgtgtacggcggcataaggccctttctcaaccaaaatccttctgatgtttttgatgtaggcgacaggacccgaccgaccgatgctcggtacataaaacacccggccgccgcgcgtgatgatctccgggtcgtaatcgcacgtttcttcccggtgggaaataaaatcaaattgaatatgccgcctgtctgtgtggcggtatatattcataatcatcgtctccgcgccgccgcggttcattccgcttacgatgtgaagcacccgttttggtctcacgcttccgtcattcatgttttacgacccctccgccttcattcatcaatcttcttttatgatatctgttcatgataaaaggaggcataagccccctgatgatgggtttcattgtataaatatagtccgatagcggcagcttcagccgtctgcaggcggcaaagacgataaacgcattatcaatcgagtagctgagctttctccttttaaacgccgattcgtcttcccttactttgtataaggcttcctgaaggttgtagcccgtgaagcccgcctcaaaaaaacgaagccacaaatcgacatcttccatccttcttgttctccggccgacccgatagccgtccagcgcctcgtagacgtcggctctcatcatgatcgtcgcatggcaaaacggcgtccctttcgccatgattctcggttctggagaggaaggaagcattctgacgcctctaatcccgttttcgtcgaaggccatcatgccgcttccgacgacatgataatgagattgcgattccaaaaacgcgacctgcttttcaaaccgcctcggcaaagagatgtcatctccgtcctggcgcgcgatatatttcccgccggcgtattggagacagtggtttaacgaggcagccagccgctgattcttctcgtttttgatcagcttaatcttatctgcgtaatgatcggcataccgcctggcaacagcatatgtcccgtctgtcgaagcatcgtcgcatataatcagttcccaatttttataggtttgatttaaaattgactcgatgctctctgcgatcgtgttctcacaattgtagactcccataatgacagaaactttcggcttttgaccccctatcatcctttcagcctcctttcaactgtttcgttatccataaaggaagagtaaatgcccgccatttctttgacggtgcgctgctgggaaaaagcggcggctgttcgtctccccgcgtctcccatcttttttcgcaaagaaggcagacggtacagctgcaatatccggtcgctgaacgttccggcgtctccctgcggaaccaaaaatccgttcacgccctcttgaatgacttcccggtgtccgcggttgtccgctgcaacggcgggctttcctgacgccattccttcaaggaggttcatgccgagcccttccctgatgcttgaggcgacagacacgtctgcaagctgaatccattcgtggatgtttttttgaaaaccggcaaacatgacgagcgaagaaacgcctttttgttcagcgtgatttcggtatttttgctccatctgcccttttcctgcaaacacgacctttaagttcggggctctgtcttttaaagcagccgccgtttcgatgagcaaggcctggtttttattcgcgttcagctccgcgggatatatgaggataaagtcgtcttctttgaaaccgtatgttttcctgagcagcattttctctgtttcactgacaggatgaaaccgctccgtatcgacgccgatcccgtggattttttccgtgcgcagcgcttttcgcaagccttttgcaaggacgaaatcttcttcattgatcgtaatcaggcaatcggtcaaagcggacagccctttttcaatcggataatacagcagccaattttttaaaggagcaccttggcaaaagtggaaaccgtgagcggtatagatcactttcgtcccctcttttctctgtttccgggccgcaagccttgccagcacgcctcccatcggcgtgtggcaatgaatgatgctgtaccggtgttcgtcaatgattcgcgccagctcccgataggcagcgatattgcttgcattcaaaggagaacgcctgatatcgatatcaaattttttatctgtatagggcagtgtcatatctccttttgcggcgatatgaacattccacccctgctctttaaaccattttaaatacgggaggtggaaggccttgaaatggtaatccacagtagcgcaaaacaaaaccgttcttgtcatgttcttccccctagtgcgctgtcaccagctttttctcgtgctggccgatcgctttgaacaagcgttctctcagctcgcggtctgacaaatacataaattcatccataaatgacttcagcaccgtccattcgacgtcgaccgccttgccgatatgaatcttcggaaaaacctgctctgccagcacttcattttgattcagcagctcttcgtacattttttctcccggccggatgcctgtaaattcgattttgatctgttctgtcgtatagccggaaagctggataagatttttggcgaggtcgacgattttgaccggttcgcccatatcgagcacgaatatctgtcttcctttggcaagcgcccccgcttgaataacgagccttgaagcttccggaatcgtcatgaagtacctcgtcatgtcctggtgtgtgacagtgaccgggccgcctttagcgatttgttttttgaaaatcggaatgacgcttcccctgctgccgagaacatttccgaagcggacggcgacaaatttggttttgctcgttttgccgagattcatgatcagcatttccgcgaaccgcttcgttgcccccatgatattggcagggttgaccgctttgtctgacgatatcaggacaaatgtctccacttcggtttcgtcggcggcctcagcgacgtttttcgtgccgaggatattgtttttgacagcttctttcgggcatttttccatcagcggtacatgcttgtgggcagctgcatgataaatgacattcggtttgtagcgttccatcagcaaaaacattttttctctgtcctgtatgtccgcgatttcgggataataggcgacatgctttccgaatttctccttcagttcaagcaggatcgaatggatgctgttttctccgtgcccgactaaaatgatcgatttcggtttaaatttgctgatttgccggcagatttccgagccgattgaacctccggccccagtcacaagtacgacgcggtccttgaccgtattggagatttcgctcgtatcgagctggacaggctcccttccaagcaaatcttctgctttgacatcgcgaagctggccgacaggatgtctgccaagcaaaatttcgtctattttcggcatgatttgcgttttgacacctgtttgcgcacacgccttgtacatttcctgcatctgagtgacgctcaaagatggaatggcgatgatgatccggtcgatattccattgccggaccgcctgcataatctgctctttcccgcctaagacgggcagacccatgatttcaagccggtatttcgttttgtcatcgtcgataaaggcgacgggcttaatgttcaattccggcttctgcacaagctgttttgcaatcaaactgccggcagagcccgctccgatgataagcgcccttagagatcctttgctttctttgttcacctgttccctgatgatgcgccacatcatccgcgatccgccgatcaaaatgagctggaacagccagcttaaacataaaagacgaaccggaacgttttgaaagaaaaacagctcgagggccgccgtcacaagatgggacaatgtaatcgatttaagcagcacatacaattcaccgatgcttgcatactcccatacttttttataaaggtggaagcaatgggcgaataaatgctgagcgccaagcagtatcagtgaagtcatcagcagcatttccgaagggtataaatcatatgatggcaaaatcagctgatatccgataaagatggacagcaaaaccaagtacgaatcgagtgcggtaataatggaaagccttctccgatatgtcaatttcctacctcctaatgtatctttctagctgataggatctttcagggcaaaatcccatgagctaaaaagatacgggcgattttcaaatttaaaccgagcacgtaaattaaataaagatgggcatttaacccgtcctcacgccccgccatcgacgacttgcgtctaaggcagacaggtagtctgcccacggtagagccgagtgcctccatcggtaaaggcaaggagacatcacctaaagcggctgcagccgcttcataagattacatggttgcgtaattatattggcgcgctttcttcactttccgcccgttcagcacggcgccgagcagttcgcttttggaagaattcagcgcgtcccgagacttgatcgcgttatcaagctttgtttttccgctgaggatgacaagaatgcttccatccacctgattcgccaatatttgcgcgtctgcgaccggcaaaagcggcggcgaatcaaggatgactaaatcgtattggtcgtacgcttccgcaagcaggtcctccatcgcctgcgacgacaaaagctcggacggattcggaggaatcggaccgcttgtcagcacatggagattttccgcctggctttgctggacgacattttccagcgtcgattttttcattaatacatttgtgacgcctgaatggttatcgagctcaaaaattttatggatcgtcggctttcttaaatctgcgtcgatcaaaaggacctttttttcctgttgcgaaaatacgatcgccaagtttgaagccgagaatgatttgccttctcccggcaggcccgatgtaatgagcaatgacttgaacggcttctcaaatgatgaaaactcaatgttcgtcctgatcgtccgatactgttcgacgatcggcgtgttcggctgatgcaatgcgacaagcgccgattgatatttgcgagagcgtttttttctaatacccaagcggctcactccttcctgcttttacgcggatattcatatcggggtccccgcgaaacagactttttttatgcttcatttgctcaatacttcccaaataaatgaatcccgcttccttttcgacttgagacggtcttgcaaccgtatcatcgataaagtccaaaaagaacgccaaagcgattccggtcattaatgcggcgccgaatgccagcaaaatattcattttgtaattcggtctgacaggtgtcggcgaatcgactatttcggcttttgacaggacggttacccgatcggtgttcataatttgcttaatctcttttttgagcaccgcagttaaagtgttcgctatatcggccgcccgtttctgattttcatcttggaccgaaatatttataatctcagattcgctttcactgctcgttgcaattttttcacccaaccggcccgcagagtaaggtaaatcaagctctctcttgacttgctccaaaatcaccgggtttttcaaaagcgcttggaatgtccgtgtgtattgaagattgatttgaatatcgctgtatgtggcgctcccctttttctcccctacttgatgcaccaagatctgcgtcgatgcctgatagacaggtgtcagcacatagaactgaatgattccggtcgtcaatgttacacctattgtcaaaacgagaataagaaccgttctttttcgcaagattgcaatcagttctctaaaatcaatattttctttcatgcttgactgcctcctcaggaatgccgtttgttaatgattggattataaaagaaaaaatttgaattgaaaaatgctgaatttagctatatagttctttttagagaacaaattcgttcgttttcttttattttctgtcgatatcttaaatttttgaattttataaagaacaaattatttcttataatgaacaggaaagcgttttatatgaatggcaaggggaaggggaggattcagtatgatcggaagagtcatccgaatgtacagaaagagaaaaggctactccattaaccagcttgctgatatagcaggcgtatcaaaatcatatttaagcaaaattgaacgcggcgttcacagaaatccgtcagtcgaattcctgaaaaaaatctcccgggcgctgaaagtcgaattaaaggaattgtttgataccgaagtgatcctttatcgccggactgagcaggaagatgagtggagaacccatcttgtacaggccgtgcaggccgggatgaaccaggaagaactgtttcaattcacacatcgcctcaagcagaaaaagaaagaacgggcgctttatcgaaacagagagctgacccgggcgaatatcgacgaatggagagcccttatgctggaggccaaagaaatgggactgaccgtcaaagaagtagaagcgtttttgatgaggacaaaaaatcattaatttatcctgcattcatattttttttagaagaaaacgggtgcttttgacttgaaccattcatccggatataaatccacatttccatttcaacttgccgaaaattcggaataatcgcattaatagatatcgcccgatcatgatgatccatgtctatagctccgttttcacctgtttgccttattttttcatggcagtctttaagagactttttgcttatgtttatatataaatgaagaaactcggattttgacctttcgcatcatcctccaatgcatgcaaagtctgtgtcttgcggcttatatcaagacctttgtcacggcccgattccttgaatggggacggagcgtttttgttgaatccgcgctggctgttcgttaagatgaataaaatggaagaaggagatgaaatcatgaaagtattagtgctcgcatttcatccgaatatggagcagtcagttgtgaacagagcatttgcagacacattgaaagacgcaccgggcattacattgcgcgacctttatcaggaatatcctgacgaggccattgatgtggaaaaagaacaaaaactttgtgaagaacacgatcggatcgtcttccagtttccgctttattggtacagctcgccgcctctcttaaaaaaatggctggaccacgttcttctctacggctgggcatacggaacaaacggcacagcgcttcgcggcaaagaattcatggtcgctgtatcggcgggcgctcccgaagaagcctatcaggccggcgggtcaaatcattatgcgatcagcgaactgttacgcccttttcaggcgacaagcaacttcatcggtactacataccttccgccttacgtcttctatcaagcgggcacggccggaaaaagcgagcttgctgaaggtgcgacacaatacagggagcatgtgctgaagtcattttaaatgagaaaagcccggcttatgagccgggcttgttccttatacttgaatctgtttcacttttcccaataggaatagataatttaaaatggcaatgatgatcaaagcagccgaaaaaaggagcgccggcacgaaagaacccgttgcgccaacgatgaagccggtaatgatgggtccgaccactccgcccatattagagactgtattttgaataccggcaaccatcgacgtcatatttttcggagccacatcccccggaagcgcccagacttgggacgcggcgacagtcgttcccgatttcgctacacaaagaaggatgacagccaggatagcggaatctgcaaaagcggcaaaaccgatgcacgaagccatgacaagcccgataattaaaaacagtttccggacggctgtcagcgacagttttccctttgcatatatccggtcggacatccatccggctccgacttcgacgaccattgcagtcaaaagcgggagagacgccataatccccatctcgattaaatccatgcccctttctttaacaaggtatgtcggcagccatgtgataaagaagtaagaattataattgatcatgaaaaatccaatgcacatcgcccatatgttgcgatatttgaatagctgataccacttcagcggctggccgccgcccgtttcttccatgtgagcctgcccttcccgaatatgggccagttccgcctcattgacgcgcttatgatctgcgggattctccttaaagaaaatcatccagacaattccccacgcgacaccgacaagtccgatcaaaagaaacgtcagtttccagtcaaagaccgctatcatccaggcgatcaaaggcattgcaacagctccgccaaactttgacccgctgtcaaaaattccggctactgtcgccctttcttttttcggaaaccatttggcggcaatccccgcattgctcggatatgcagcagcctctccgactcccagtgcgacccgcagcccgagcagggatttgaagcctgtcgcaagacccgtcagcgccgtagcaacagaccaccaaacaaccgcaaaaccgagcgtttttttctgaccgtacttgtcggccgcccagcctgaaggcagctgcagcaaagcgtacgaccagaagaaaccggacatgatgattcccatttggccgggtgtcaagttgaactcctcggtaatatagggagcggcagccgaaagaactgtccggtcaatataattgatggcaatcgcagcccacatcataaacgcgacaacccagcgtacatttgactttttttgaatcgggtgattcaacatgttatccacctcatcccatttgtagaaaacgctttcaaatcatgatgcagggcatgaatgaaaacacattcacaacccgttgacgacaaactccggtttttgtttgtcgatcagtacactagcgatgtttttgacgcatatcatgccaaggttctgtacggcatctcgggtataccccgcgatatgcggcacggcgataaaacggtccagctcaaagagagggtgctgcttcagcggttcggtttgatacacgtcaagcgcagctccagcgatgcccccgctcgccaaggcatcatataacgcacactcggacacgatgcctccccttgaagcattgatcagataagccgtttctttcatagcggctaattctttttcaccgatcatgttttccgtttcggctgtgagcggcatatgaagagtgataaagtcgcattctttcaagagctgatcaagctctgtaaaatggatgtgatgatcggctgcgaatgcacgatcaggaaacacatcataggctaaaacagtcatattgaagccttgcgcccgtttggcgacttcttttccgatcatgccaagtccgacgatgccgagtgttttgccgtaaacgtcagatccaaaaatcctcggccattttcccagctttgtctccctgtcggctgcaggaatctgtcttgcagccgacagcatgagaccgaatacaaaatcggcgactgcatgcttgttggcgttgggggcattcgtcacccagacgttgcgctctttcgcagcgtgcagatcgatattgtcgacaccgacgccatgtttgcagacaatttttaaagaagggagacgatccaggacatacggcgtaatctggttaaacgccacgatcgcggcatccgctccttctgctgcttcaataaactgctcctcggttatatctgcaggaaggcgttccagcgacatgccctttttttccaaaaacaagacgggatcgtctgagtatttcgcaaatgacggtgatgtacatacgactttcataagatgcaccaaccttctttcatttttctacgatttgggcgccagctcagcggctgaccgcaaagcagcgagcatgcttctttcatcggctttgttctgccccgcaatgtcaaatgcggttccgtggtcgacagaggtgcgtatgatcccgccgtttaatccgactgtaatgttgacgccctcttccaacccgaggactttgaccggtatatgcccctggtcgtggtagcaggctacgacaaggtcaacatctcctctgacagctttgtaaaacagcgtgtctgcggggtatgggccgccggcatcgattccctcagctgccgcctgctcaatccccggaagcaattgccgttcttcctcgccgcttccaaacaggccgttttcccctgcatgggggttgattccgcaaacagcaattttcggctgttcgaatccggctcttgtcaatgtatcatgtgcgagacggatgactttataggtccgctccggcgtaatcgactgaatcgcctcgatcagcccttgatgcgttgtcaggtgaatcaccttcagctttggcgaagccagcatcatgctgtagtctgttgtattcgttaaatgagcgagaatttccgtatgccccgggtatcggtgtccgcctttatgcagcgcctccttatttaacggcgctgtgcaaatcgcttgaatacagccttttttagcgagctcaaccgcttttttcacgaaatggaaagcggcgtttccagcttcagccgacacctttccgacaggcaggttttcaggcagcagttcaatatcgagacaatcgatctttccatgtacaaaaccgccctcgtccggatgcccgaccttgttaataacaacctctgatccgatttggaaggcggcttttttcagcattttcatatcgccgatgacgagcggcctgcacatatcatacacttcgcgggacgtgagggcttttacgataatttccggaccgacgcctgccgcgtcgcccattgtaatgccgataaccggtttcttcattgtttatcctccttgtagcttgattgccgcacttgccatcaccgaacgcgagccaaaatttccggcctttgtcacaatgtacaattcttcaccggctgctcccagcggaatgccgggctctacttcgtccagcaatcgtatctcatgaatccgaagctgatgcagcacttgatatgccgtgtcacctccggttaagaacagccgtttcacatgaaaagcttgaatcagctcgcccgcaaattcgccaagtgcaccggacaccgcattgctcgtttgaactggggtgagtccgcggctttcaccaatcttctgtgtctctgccgcattgtctgaggtgcagaggacgatgtgtttcgaacggcgccggacgtccgccgccctttccttcagccgttcgaactcgtttcttttctcagctccgccgcacagcacgcgctctgatctcatttcaattttttcagccgcacgtccggcgaatagttcgtgaagctgttccctccccgtccgactcatgcttccgacgacaaacatgatcggctggtcggaagacggaacggtttgaccgagctccctttctttcagattgaacgctttgggcagacagctcatcaagcctgccgaaccggccaaaatgatagaatacggcaaactctccagaataagcgccagcccctgcagatcggattcgtgaaccgaatcggccgtcacatatgaaatcccctccgcccgaaagcgttccagcttgttgcggacatgcccgtgtccgcggcggatgtcttcatatgataaatgcccgctcttatttcgagtctgcttttctattaatctttgaatattcgactcggctacaggcgttttcggatcgtttgccgcttcggtttcttcaagctttacgccgttcacataatggatgccgccgataacctggcgtccgttttgagggtagccgggagcgatcagcacaaagtccggctgaaacacttcgtacatcgcttgaagctcggctccgatatttcctctcatcgtgctgtcgatttttttgtagacgatatcaaacgattgccgggagatgtgttcactgatgtttttaacagtcgccttcgcctctgcggctggcagcgatctgctgtccgtattgaaaataacgacgccttccgtttcccgtctggtgaattcggcgtcgagtttgacggaaacatccatcccgtaatgaacaagctgaccgccgcagtcgttcgctcccgtcaaatcatccgcgatgattgcaattttcaaatgtcttcatcctttagttgattagttttcgatagatgtcttttatattttccagactgagcggtttcggattgttatgaagcaggcgcgtcacttttgaagctgagtcggctaaatcgtccacgtcgcttgcggttacgccgaacgcttttaaatcctgaggaatattcagccgctccgtccactctcttattttctgcacaacggcctcagccgcttgttcggcggtcaaatcagatgcaacgattcccattgtttctgccgcaagagacagccgttctgtaatggcatccatattaaactccatcacatgcggaaggagcatcgaattggcgacaccgtgggaaattcggtatttccccccaagcggataggcgagggcgtgaacggcagcagtaccggcagccgtcagcgccattccgccatacgtcgaaccgagcagcatgttttctctcgcttgtatcgatgaaccgttttcatatgcttccacaatacttgccgaaatcaatctgatggattctaaagcgaacatatcgctgatcgggtttgctttcgtcgaaatgaacgattcaagcgaatgagtgaatgcatccattccggtagccgccgtaatcggttttggcaatccaagggtgatgaccgggtcaagaatgacaagtttcggcaaaagaagcggactgacgatgccgactttcaattcctcttctggaagggtaacgatcgcgttcggcgtcacctctgcgcccgtccccgaagtactcggaatcagcacggtcgggattcccggcttttcgaccaaatctgtcccgagcagctcctcgaccttttttgaattcgtttgcagcacggacaatattttcgttccgtccaaaacgctgcctccgccgattccgatgagaatgtcgtatcgtttctcacggatgcctctaaatacgtcttcaatattttgtacggtcggttccggcaatatggctgtgcaaacatctgactgaatgccgatctctgtaagctgagcctgtacctctccgatcgcgccgagcttgacgatcgacggctgggtaataatcagcgccctgtccgccttcggtacaatcgttcgcacatgatctttcagccggcggatggaatgttcacctgcaacgatatgaccggctgtccgaaattgataattcgctggcattcttgaaacctccctattttgattgataggaagcaaccattttttcgacctccaaaagcgccggaccggtcagttctttgacgggcgctttcggcgggcctacagggatcgaataaagctcaaccgcttttttcagtgccgccgggatcgtacctaaacgaaacgtatcgcgaagcggctgaagctccatctgggcagcctccgccttttcagtctcaccctctgcccaatggtggtaaatagacgttacgatatccggaagcatatttgctgttgctgcgactgctcccgctcctcccgcttgaagcgttttcaatatgagcgaatcggtgcctgcaaaaacggaaaagtcgtcatttttcgtctgctcgatatactgttgtatgttttcaaagtttccgctgctgtccttaattccaacgatattgtccacttttgcaagctctgccactgtttctggttctaaatggaaacctgtttttgaagggatattgtacaaaaggatcggaagtgaaacggatgccgcgattgttttataatgcaccgccgcttcttcctgtgtcggtggaataaagaatggcgtgatgaccgacagcgcatctgctccaagcctctctatttccttagaaagccagatcgcttcttctgtgctgtttcctccgctccctaccatgacgggaacgcgttcggccgtttcttgaatgatgatttctgcaactttcagcttgtcttcgatgttgaacatatgaaattccccgttggtacccaacgcaaaaagcccgtgtacatgagcatcgatcaaatggtttgtcagctgtttcaatgccgattcatcaatgctttgatcttttgtgagcggtgtcagcatagcaggataaatcccctttggtacgaatcccatgattgcctccccttcctataaagcgttttcaaaaatgattatatacataaatgtttcaataatcaacggtatttatctaaatatttttatttgttgttgcatattaaaacaaaaaataagacaccggtttagccggtgtcttatcaatctgacgatttcaattttctccaaagcgtcgttctgttgatgccgagcctttccgctgttcttgtttgattgttcccttcttcggcatagatcttttgaatgatccttttttcgatctcttcaagcgttccggataaatcgatgtcttctctttcttcctcgttcaagcggctcaggacccgttcggcgtcagtcttctcgatatatacgccctgcgcttcaaggacacagttttggaccgtttttctcaattggctgaggttgcccggccatttcgcttcttcaagcagaacaccagcttcgtttcgaaagccgacgatttgtttgccgaatgcctcattgctttccgcaataaacagataagccagatgcaaaatatcctcttttctttcggaaagagggggaacgtccagttccaaatgacaaagcgcatcatataaatcgcttgaaaattcctcggcgcgcctgcgggaagaagaaacgatcagcctcggcccatcatacggttcgctgatccgcctgagtaaaagccgttgcgaggacggcggcatgcgatcgacttgtttgatgtatagcgttcctctccctgaaaagaattcttcgctttcacaagcctgttcccattctgcttcagacagcaaaccggcatcgatttttcgaaacggctcatgcttgtcctcccccttcatatggatcagcccggccaagctctctttccctgagccgggcgctccattgatccatacgggttcccgccttgccgagaacaactctgcttttttcagcaccttctgcatcgtttcgttccttgatgtttccatataactcatccgcaaaggagaaagaatcgttgccccgggcaaagaagaaacgcgaacatcttttgcattttccgcggtaaatacggtcaatgcctcgtctgatgcgaaaaacctgcgccccgtgatattccatgtccgcccatgctttcggagtctaaaatggatgactcccttcttttccgcttccccgatcagctcttccagattatccagcaagccgatatgttcggcaaatacgccgttttgaaaaaccggccgcaatgtcttgttgtatactgcataaccggtctcggccttttgtaaaatgtgatacggcacagcgtacttctgcttgatgctctctaaaaaggaatacagttttttagcgtatgcaaaagctttggcaatgctttcttttccggatgtcaaaagcagtccgtttaaaccgagctgctctgctttctcaattgtgatcacatcgccgataatgatctgatagccctgttctttgagctgaagaagcaccggttcaacatcgcgttcgtctgatacggtgcaggcgtcgatccgaatatccaaaatttcgcacaccgccgatgcgccgtcggcaatcatcggaaatccgacaattgccgccttgccgggatagcccttggcaagcgtaagcacacgcagcatatcgtatcccgacacttcgatatccacaaccggaatggaaacttctcgctggatcagctcagcggttccacctctgctgataatcaaatcagtcccgtttgcttccgcttgtttcgccagctccacgcccttctctaaatctccggaagccgcctcgaattcaaaattctcgccgcctgccacttgaaccatcagctctttcagtccttcatatggagcaattgccatcactttcatattcgatcaccttttgttgcaaatttaaacacattatcactataccaaaaggcagaaatatttggaaccgcaaaacgaaggcaaaataaaaaggctccattacggaagccatttccccccccatgcggccatctctttaaaaatgctgtggaactctttacctttttctgttaatttatattctacagtaacaggaaccgttgggaacaccttccgggaaatcatgccgctttcttcaagatgtcttaatgtgtcagttaatcctttcgtgttgacgtttcccaagttccttctgagctcgttgaatcgccgcttgccctgaatgagttcggcgagaactaaaaatgaccatttaccagagaaaattttcaatacatcctgaattaaagaagagcattctttatgatcgacagctgaattcatagcaattcctccattgcctcatagccaattttgacttgatcctaccatatggacatcagagcattcaagaaaacgatcttacggtttatttttataaagcatatataaaaaaattgcgttcttgtggagccttccggcggttgctatggttatatcaaaaggaggaaaaacatgaaaaaacaatacgagtctttattcaccccgtttacttttaaaaacggaatccaattgaaaaataggatcatcatgccgccaatggggcattcatcctcattgccgggaggattcatttctgacgacgaactggtctattatgccgcgcgggcgacagaagtcgggatggtcatcacatctgcgacaaccgtacagcccggaaccggatttccaggcatccccggagctgagaacgatgatcaaatccctggactaacccggcttgcagccactttaaagaaacacggagcaaaagcaatcctccagctcttccatcctggagccaaaggtatagagcggacggtcagcgccagcgccgtcgctccgaatcaaccgaatgcaccggtgccgagggcgctgtctgagcaagaaattcaagaccttatccattctttcggccaggcggcgcgaagagcgatagaagccgggtttgacggagtcgaaattcacggcgcaaacgggtttctcatccatcagttcttctctccttattacaaccggcgcaatgacagctggggcggcactttagagaaacggatgagatttccgcttcagattatagaagaaatcagacgcgtagcggatagctgccataagccgtcctttatcatcggctacaagttttcgcccgaagagccggaaacacctggaatcacaatggatgaaacgttgtctttcgtcaatgtactgcgggagcaaggattggattacctgcacgtatcactggttgatttccggtccttgccgcgcaggggtgcagacagatcccgcgcaaggatggaactgatcaaagaagccgtccaagaccgtctcccactgatcggagccgggcaagtacacacaccggaagacgcccttcaagcgctggaaacaggagccgatctcatcggaatcgggcggggtctcctgatggatccggagtggctacaaaaagttcgagccggaaaagaggacgatattcaaacaaccctgtcaagacatgatcagcggaagctcgcaattccagatgccttttgggaaagtataccgatgtatattgatttcagcgattgacgattcccgcttatacagactatagattcatataaaaaaggtgtctttccgcttaaaatcggtgtcatttgcataaaaatgtataggaaaagaggaacttagaccagttgagtcccagagatgagtatattagaatgatggtaattcaatatcgtcgggattgttactgtctaagcaggcaagacctaaaatgtgtgaagggcgaaatctatcttttgcctatatgaacttgcacattttaggtcttttttctgttcttcaggacaatgccgcagttaggagggatgattgggaacgttcatgttgtcagaagcaatctattacatattgaaaaagggaggaaatattgatgaacatcaaaaacattgctaaaaaagcgtcagccttaaccgttgctgcggcactgctggccggaggtgcgccgcaaacctttgcaaaagaaacgcaggattacaagaaaagctacggattttctcatatcacaagacatgacatgctgaaaattcccgagcagcaaaagagcgaacaatttaaagttcctcaattcgatccgaaaacaatcaaaaacatcccttctgcaaaagggtataacaaaaatggagagctgatcgatttagacgtatgggacagctggccgctgcaaaatgccgacgggacggttgctacataccacggctacaatcttgttttcgcgctggcgggcgatccgaaagacgtcgatgacacatccatctatttgttctatcaaaagaaaggcgaaacttctatcgacagctggaaaaacgccggcagagtgtttaaagacagcgacaaatttgttccagacgatccgtacctcaaacatcaaacacaggaatggtcaggttctgccacgctgacaaaagacggaaaagtccgactgttttacacagctttttccggcacgcaatacggcaagcagacgctgacaacagctcaggtcaatttctctcagccggattcggacacgctcaaaattgacggtgtagaagatcataaatcggtctttgacggcgccgacggcacggtataccaaaacgttcagcaattcattgacgaaggaaactacagctccggcgacaaccatacgatgagagacccgcattatgtggaagaccgcggccataaatatctcgtatttgaagccaatacgggaacaaaaaccggctaccaaggagaagactccctattcaacagagcctactacgggggcagcaagaagttctttaaagaagaaagcagcaagctgctgcaaggtgcgaacaaaaagaacgcttcgctggctaacggcgctctcggaatcatcgaattaaataacgattatacactgaaaaaagtcatgaagcctttgatcgcctccaatacggtgacagatgaaatcgaacgggccaacctcttcaaaatgaatggaaaatggtatctgttcacagattcaagaggatcaaaaatgacaattgacggcatcggttcaaaagacatttatatgctcggctatgtatcaggttcattaaccggaccattcaagcctttaaacaaatccggacttgttttgcatatggaccaggattacaatgacatcacgtttacttattcgcactttgccgtaccgcagaaaaaaggcgacgaagtcgtcattacaagctacatcacaaacagagggatttcgaacgagcatcacgccacgtttgcaccaagctttttgctgaagatcaaaggatcaaaaacatccgttgtcaaaaacagcatccttgaacagggacaactaacggtaaacaaataaaacgaacgaaggaaaatgccggtgaacatcggcattttctttcgtatgtcatcttagaataaagcggggaattttcttgaagaaggcagtatataagcggatcagcattttaactgtttgtcttggaatcttcatcatgatatttctttcagtccgggaaacagaaaaaaagggagaatctccggatacaccggaatatcgtgcagctttccatttgacaacccctgacaaatggaaaaacgaccctcaaaaacccgtctatttcaatggagaatatcattactactacctctataaccgagactatccggacggcaatggaacagagtggcgccacgcagtatcagatgatctcgtcaactggcaggataaaggggttgccattccgaaatatacgaataaaaatggcgatccctggtccggttctgtcgttgtcgactcaaaaaacacagccggcttcggcaaagggacgatcgtggcggttatgacgcagccgtcggccaatgacgggaaggaagagcaatttttatggtacagccaaaatggaggaaaaacatttaaaccttacggtgaagagccggtcttgcctaatccgggcaccgtcgatttcagagatccgaaagtgatctgggatgaacaggatgataaatgggtgatggcgctggctgaaggaacgaaagtcggcttttacgaatcgcaaaaccttaaggaatggcgttatacaggtagttttcaaacagaaaatatcggcatcatcgaatgtccggatctgtataagatgcgggcggatgacggaacatataaatgggttcttggagcaagcgccaacgggaaagggaccggcaagccgaatacttatgcatactggacaggcagcttcaacggcaacgaatttacggcagacgaagcagaaccccagtggcttgattacggatttgactggtatgcgggcgtgacatttgaggacggcgaaacgaacgatccgtacgagaaacgctatgctttggcgtggatgaataactgggattatgcaaaccggacgccaacatggaaagacggttttaacggaaccgattcgatcgtccggcaaattcggcttaaacataaaggcggagatcgatacagcctcgcctctcatccaatcgatcaattggatgaattaaccgaatctgccgatgaattggatcgcatcgaagtgaacggatcaaaaacgctgcagattaaggggaatacctatcagcttgaggcagatatctcttgggacgaccttaaaaatgcgggtttcaggctcagagaatccgcggaccgaaaacgccatatcgatgttggaatttcggctgaaggcggatattcttatgtgaacagaggatttacgggacagcctgacagcacccgcacctatttggaaagcaaagcaccgtttgatccggaaaaaaaacgggtccatttcacaattatcgtagatcaaaacactgtcgaagcatttattgatgacggcgaaacgacgcattcaaaccttgcatttcccgacatgaatgatacaggcatcacactctttagcgaaaatggaacggccgtctttgaaaatcttaagatcaaacatttgcgttcaatccgcgattaaacaacacgggcggccaagcggccgcctttttttgtgaaagcgaatcattacgctcactctccgaatacgactaaagtgttcacaaaaaaacaagggcggcaaatgccaaacccttgtcttgaaaacgcgctcggagggattcgaacccccggcagacgtggtaccggaaaccaccgctctatccagctgagctacgagcgcacaatatgattttttaacgtcagcaattcatattataagggctgttctttaaaaagtcaatcacaatctcctgctcgaaacaaaaaacccgcatcatcatgatgcaggtttagataatacggaagctataatcttttgttcgatttcttcatttacttcgtccgttgttttgacaaggcagataatgccgtcaataaaaggccaaatgaataatgtaatccagccgagaagcaacatggctacagcgtagccttttctctcgtccagataaaatctgtgagcggcaacgcctccgagaaaccaccataaaagaaatacaatcagcttcgatttcttcttattttgcagctctgaagccacgacaagcctctgctgatctgtcaggttactcttgtccaagttcacataacccataattgatttccttctttcctataaaataaaatgaagaccaatggactaatcttagactattggacctaaattttctatacttttctctataaagttgatattttgtttgagtttccttcaaaatgggaaaaataaacccagtatgtcttttggatgaaggcggctttttgtttgacctttattgaccaaaaatgtatgattaaactacatacttaccttttaaggtgaaggaggagcattatgaatttaatacctacagtcattgaacagacgaaccgcggggaaagagcgtatgacatttactcacgcttgttgaaagaccgtatcattatgctgggatcagcaatcgatgacaatgttgcgaactccatcgtatctcagcttctattccttgaagccgaagatccagaaaaagatatcagcatctatatcaacagccctggcggctccatcacagccggtatggcgatttatgacaccatgcagtttattaaaccgcaagtctccacgatttgtacgggaatggcggcatccatgggtgcgttccttcttgcagccggcgagaaagggaagcgctacgctcttccaaacagtgaagtcatgatccaccagccgcttggcggagcgcagggtcaggcgactgaaattgaaattgccgcgaaacgcattctttcattgcgcgacaagctgaacaaaatccttgcagagcgcactgggcagccgcttgaagtaatcgagcgcgatacagaccgcgacaacttcaaaacggctgaagaagcaaaagaatacggcctgattgataaagtgcttacacgcaatatcgacgcacagaagtaaacagccaaaaagctgccggagtcaccggcagcttttttttactccaaatgggttgtcccattcgctatatgtaaagcttctataaatccttccactttttctcgaggacagggtagcgataatcattcatgttcccgatcaactccgcagggcttgccgaagcatgaatcagctcaaggtgcgatttgttcgaaaagccttcttgaacgctgtattcgagcattttaagaaggggttcaaaatagccgttcacattgtaaagtccgatcggcttttgatggatgccgatctgcgcccagcagagcacttcaaacagctcttcaaacgtgccgaagcctccgggcatcgcgataaagccgtcagctaattcactcattttcgctttgcgctcatgcatgccgctcacttcgatcagctccgtcaactgctgatgaacgatttcccctgtaaaaaggcctttcggcataacgccgacgacttccccgccgttttccaatacggtatccgcaatcacgcccatcaatcccattctcgatcctccataaacaaggcgaagccccttctcggcaatataaacgccaagctctgcagctttcttcttgtactccgggtccgcccccatatttgatcctgaatatacgcataccgttttcactttcgctcactccaactccatatattgataaaagcaattaacattgtactatatattgtttgttccgtgtgcgacaatataattgaatttctaaacgggagtgtataacttatgacaatcacagacgcggagcaatggacaaaggcattttacagggaaagaggatggagcgaatacggacctttcatcaggatgggatttttaatggaagaggctggcgaactggcgagagcggttagagcatacgaaatcggaagggaccgtcctgacgaagcaaaacggccggctgctgaactgaaaaaagaactgatcgaagaaatgggcgatgtaatggggaatttgatcatgcttgccggcatatacggtgtttcattggaagacatgatggatgcccatcgctgcaaactgacggaacgatttgcaggagagcatcatcaagatcaatgaccgcctttacggggaggcagatttggagcctgtgctgacagacctcattcgttcaaaagccgttcagcgtctgaaagggattcatcagggcggggcctcttttctcgtcaatcccgcatggaacatcagccgctgtgagcacagcatcggagttatgcttttgatccgcaggcttggcggaagcctggaagagcaaattgcaggtttgctccacgatgtttcccatacggcattttcccatgtggctgatgatgtatttaacatggaaaacgaagattaccatgaacagatgtttcggcaatgggtcaagcaatctgatatctccgggattctgcatacatacggattccatgatgaagacatcttatatgacgagcaaaaatggacgctgctggagcagccggctccttcattatgtgcggatcgcatcgattacacgcttcgcgactctttagcctatggatttggcgatccggtagagattggacgatttttagaaactggattgaccgttgctgaaggcgaaatctgctgcacttcggcagagcatgccgaatggttcgcccgcctttactatcaagaagtgattgacttctttatgaatcccctcaatatatatgcgctctgtaccctcagccaaatgctgaaagaggcgcttgacatgcgtgttattgcggggcgcgattttttcaaaaccgacacggaactgcttgcgatgctaaagcaaaaagcgcgcttccgggaaacgctggtaaagctcagcacagcgagcaagcgcgttaaacaaggcgacgaaggcgattttacttttcatcaaacattaaaggtgagatggatcgatccaaaagtcgctgttaacggaagaaaaatccccgcctccacactttcaaagaacgtccttctgatgaaagaaacggcaatagccgccatgaaaaaaggcgcatatgtaaaagcagcccaataaaagaaaccgcctgcttcagtccggccgaaacaggcggttttcttggttatgtcacgtcaaatatttgttcaggcctgtcgacaaaatgctttttgccgatcttatgaaacagccctgttttatgaagaagctcacgcggctgctgctgaagacccacgatcatcactttcccgttttgctggtggacacggttgacgatcgtcatcaggctgccttctgcggaagagtccatgtagtctactttattcatcagcaggatgaggagttttggcgggtggcctttgtccaaaattgaatcctccaatgaattcgatgagccgaaaaacagcgggccttcaaccgaatagatgctgacagagcgttgaaaatgcttttcttccgctgcagctgccgactggacgatcgattcagacacatcttttttaatgcggaacgacttgctcattctggcgataaaggtgatgatcgccagcaggatcccggccgccaccccaaacacaagatcctgccaaacggttaaaagaaatgtgacgacaagcacggcagagtctgaatttctaattttcaaaatatttataaactctttccgctcactcatattccaagcaaccaccatcaaaatcggcgacatgcttgcaagcgggataagggaagcgtatggcgcaaacaaaagcagaaccaataaaacgaacacaccgtgtacgatacctgaaatcggagaagcagcgcccgttttaatattggtcgccgtacgggcaatcgcacctgtcgccggaataccgccgaacagcggtgcggcgatgttcgcaattccttggccgacaagttctttattgctgtcatgccttgtccccttcatattgtctgccaccatcgcggaaagcagcgattcgattcctccgagcattgcaatcgcaagagcgggaggcatcaggtaaatgattttttccaatgacaactcaggaaattgaaagctcggcaagctgcgcggaatttcgccgtaagctgatccgatcgtcaccacctgttcgggaaacagcatcgtggccatgaccgttgatacaagcaagcctgcgagcgctcccggcactttcggcagaacctttggcgtaaacagcacaaagaagagcgatacgacagccgtcaaaatgctgtaaaagctgagcgtattcaggttgatgacaacctctctcatattcatataaaaactctcatgcttctcgacatttctcaagcctaaaaacttggcgatttctccggtgaaaataatcaccgcgattccggccgtaaatccgatgatcaccggccgcggaataaatttgatgatcttgccgagttttagcagccctaatatgaccagaatcactccggccataaaaccggcaatcagcagattctcaaatccgtattggagcacaatagcgaacaggatcgggacaaaggcccctgtcggtccgccaatctggtatttcgacccgccgagaagcgaaatcaaaataccggcgacaatcactgtgtaaagaccgtgttccggtttcacccccgaggctatagcaaaagccatgccaagcggaatcgcgacgactccaacgaccattcctgctacaatatctttttgaaaccgcttaaggctgtatccttcaaatctgcctgaaaatcgtaacattcaatctatccccccatttgatcatcgcacttccgaaagcgaaacgtcttcacgtgaataaccatcttcaacaacatccaaacggccggtctttggatcaatcaccaatccgtgcaccggaacgtctgaagacaagagcggatgtttccggatcatgttcacactgtggctgacgctgtcttcaacgctgtcaaagcccgtcatccatgtgtccaaatcgatgcccgaatgctgcaggagttcgagacagccatcatcgacaccccgctgtttggccttttgaaggatagatgaagcgttcaggcttgccattccgcactcatggtggccgatcacgcagacttcttcagcctgcagctcatagacagccacaagaatgctgcgcatgacgcttccaaaagggtgagaaacaacggctcccgcattcttaatgatttttgcgtctccattttttaaacccattgcatgatggagcagttctaataaacgcgtgtccatgcatgtcaaaatcacaagttttttctcaggaaatttcgtcgtttcgtaaaactcgtaccccttttcctctacaaaagactgattgtgcttcaaaatggaagttaaaatcgccatttttctctcactccttttcatagtcatatgaccttgatattgttacagccgaattatagcacatggatttccgctttggattcgaatcaaaaaattcactaaaaatgtactgaatatttttaaaaatctaattttatatctttctaaaataataaaatgtacgctgttcttcacctataaaaaaataactggaagcaaaatggaatatcaaatatttggatttatagttataaaaatgcattaaaataaattaaaaaactgaaataagattctatgattttctaaataacgataattgagctgatagtcctgcgctagctggaacaatctttgatttttacagaaaccgtttttcctctataatggaagcagatgatacgcggaaggagaatgcagatgaaaccgtttgtatatgtcacaaaaccggtcccaaaagaaatcgaagagatgctcgctgaacattgcgaatatgaaatttggacttcacgcgagcgtattcccagaacgaccctgctcgagaaaatcaaggaagcggacggccttttgacctcaggaacaaaaattgaccgtgaattattatccaatgcactgaagttaaaaatcgtcagcaacaattccgtcggctatgacaactttgatattgaagcaatgaaagaaaaatcggtcatcggcacccatacgccatatattcttgacgacacagtcgcagaccttgctttcggtctgatcctttcctcagctcggcgaatcgccgagctcgaccgctacgtccgcgagggaaaatggaccaaatcagaggacgatgaaagcttgttcggatctgatgtccatcaccggacgctcggcatcatcggaatgggacgaatcggcgaacaagtcgccaaacgggcggccttgggttttgatatggaagtgctctattacagccgcagccgcaaacccgatacagagaaaaaaaccggcgcggtttatacgggctttcatgagctgttggagcgctcggatttcattgttctggtcacaccgctcacggatgagacataccgcctcatcggcgaagcagaattcaaaaaaatgaaaccgtcgtccattttcatcaacatctcccgcggtaaaacagttgacgaacaagcgttgattcaagcgctgaaagaaggatggattaaaggagccggacttgatgtatttgaaaaagagccgattgaaaaagacaatccgctcctaagcctttccaatgtaacccttgttccccacattggatcatccacccatgtcacacacgtcaacatgctgaaaagcgccgttcaaaacctgattgacggtcttcagggcaaacggccaaaagatatagtcaaagaactgagataacgcgcatctttcaggcgcggaacgttttgccaagctctcctcctaagccaaaatagtgtctgaaaagataaatcaaaggttcccatttttgaggatcgatgtggtgttccccttttaaaatcgcttcatgtgcgtgcacatgaagcacttttgtttcaatgacggcaaaatacggggaatgttccggaatgcgaatgttgacagcttccgcttcaatttgaagcgggcaatcggcgactctttcaggtttcactgccaaggaatccgcggccgtaaatccgccggcttcaaatttctccttaaggtaagtaaagccgagccgctttttttcttccggaacgaatcgtttgccggtataggaagccagccgttctacatttctccataaagatgaatccggcacattgataacgcatccagcatgcctctctaaattttccaatgctttaccttcggttccaataccgagtacgatcgaatccccgagcgcccaagaagatgacagcgggctgagattcgtggaaccgtcttcgttcattgtgctgagtaaaatgactggtgttccgtaatataaaatgcttggctgaataattttgctgttttgttccatatgcgtctcctccttttatgcttttattgtaattcttcaatatttcaattaacatcgaagtatcgattgcattttaggaggaagtgtaatgaacgtgaatccaaatatcgccgaggtcgccaagcttgtcaccgatccgtcgcgggcggcgattttaaccgcattgcttgatgaccggtattatacggctaccgagctggccggatatgcgggaatcaagcagcagacagcaagctttcacctttccaagctgcttgacgccgagatgctgacatgcaggaagcaaggacgccaccgctattacaggctcaaaaacggaaagattgcacaatcgctggagaccctgcttaacatagcgccccctgcggaaattcgctctttccggcagtcagctgaagatcgggcggtcagaaaagcgcgcacatgctatgatcacctggctggatcgctcggcgtcacacttgcggatcggctcgtggagatgggcgtattgaaagaagaagagacggcttttacagtgactgaagaaggggaagcatttttgaaagagcttggcatcgatgtcagggaagtcaaaaagaaacggcgctctttttgccataaatgcctggattggagtgaaagacggcatcacattgccggcgccttaggctccgcattgctcgatgccttcatccgcatgggctggatcgagcggcgcccgcatacacgggccgttgcagtcacgcccgccggcgcaaaggaactttaccgcctatttcatatttccattgaaaagaactgaagaaatagttctcgatcgttttccggcattccgggagaccaaatagcatgcggttaggaacctgcggcaagccgttcacgtcctcggctttcatggaaaatttacaataatataatgatttttgggcatgttttaaggtacaattcaagatgattgcagacggaatatggaaatgaagaaatgcggctgttcaaccccatgaaggcacattcttcatgtttatgttataaagtctaaagacagggaggactttatccgtgaaaaaaatattatcaactcttgcgctggggtttgttctcgcgctgggctttctggcggggaacctttttacaagctcagctgaagggccgcaggcagaaaaaggcggcaccgttcagtcaaatgaagtcatcaatacatttgaaggtgttgccgactatattgtgaaatacggcaggctgcctgacaacttcatcacaaaagccgaggcgtcaaaattaggctgggatccgcaaaaaggcaatctggcagaagtagcgcctggaaaaagcatcggcggcgatatctttcaaaacagggaaaagctgcttccagatgcatccggacgcgtatggagagaagccgacatcaactatacatcgggattccgggggtcagaccggatcgtctattctaacgacagactggtttataaaacgactgaccactataaaacgtttacgagaatgagatgattatatgaaacaagtcactttaaaaggagaaaagatcagaagtgtatcagatcttcacaaagaattaaaagaacagctggagcttcctgactactatggcgaaaatcttgatgcgctgtgggattgtctgaccggctgggtcggcatgcctttgctgatagagtggaagaatgtcgagaaaagccggatttacttgggcgatcaagccgaggcatatttgcagctttttcgcgaagccgaagaaacactggacggctttcagctgaaaacagaaggatgaaacagaaaacgagcgggcgcttcagacaggcgtccgcttatattaattgatgcagaaaatcggttcttcagtcaaaaaatgaatgaacgaaaatggtttggaaatctcctgcattcacatcctctttcgtcaaaccgccccctgtctgctttgtgaagtgatccttcgtcaaaattaactttccgtcctttatcagcttggaagcgagcgggtttttattaaaaggcgacgcctcctcatcgaaaattgcatcccgcacgcatgtaagcacagcttcatcgattggcgtcagcgaaaatgcatagccgatctgccacccatctcccttatccatttcaagaaggtaatctcctttatccgtctttgtttccctgacacggtaagctcctgtttttgaggggacaggttcacctgagaacggaacgggtgcaagcggcaggttgatgccgaatccagtgtccagcagataggtttcatcaccttcccgcagaattacggcgacatgcgttcccgtcagcgcccacgcctgctcttttgcattaaataccgttccgcggaccatgtgaacggaaaagccgagctctgtcagcacatagtaaagaaaagcgttcaaatcatagcataaaccgccccttttattgttcagcaaggcttccgtcagctctgttttcgtcatcgaaatccgttcgtttcttaaaaccgcgccattttcaaatggaaactgcaaagccagcagcgataaaaactcgggcaagtcggcaaatgtcacctgctgacctggcttgtatccaatcctcttaaacagcgaatcgagcatcgtcgtcatcggtaattctccttccgcttatcaatgagaaaaagccaaacctcataaaggtttagcttctttctcttgaacatatgcagtcagtgcatcaagggcatcttgttcatcggatccgtcagcgatcagcgtgacttccgatccggagctgacagcaaggctcatcagccccatgatgcttttggcattcacttttttatctcccttttccagaaaaatatctgattgaaaacggttggcttcttgaacaaacaatgccgctgggcgcgcttgaagccctgtttttaaaagaacttccactttttgttgaaccatacgatctcccccattccctattttaaagagacagattgtcctgaacgcagctgctcagctatttcatccagtttcctaagtcggtggttgatgcccgatttgctgatttttccgctcgacaccatttccccgagttcctttaatgttacttcctgataatcaatgcggagctgagcgatttccctcagcttttccggcagcgcatcaagcccgattctttcgtcgatcagcttgatgttttccacctgccgcagagaagcgccgatcgttttgtttaaattggcggtctcgcaattgacgagccggttgaccgagtttctcatatcgcgcacgatccggacgtcttcaaagcggagcagcgaattatgcgcgccgatcacattcaaaaactcggtgattttttcggcttccttcagatacgtgatgtatccctttttccgctcaagcgttttgctgtttaaatggaactgattcatgagcctgcacaatgaatcattatgctctttgtacagcgaaaaaatctcgaggtggtaagaagatgtctcgggattgttgacagaacccccggctaaaaatgcccctctcatataagaccgtttgcagcatcgttttttgactaagtcttcggagatgtttctggcaatgacaaagttgtctccgagtattttcaagtcctcgagaatcggcttggcattttcgatcaggcgtacgatgtagacattgttttttttcagtctcattttctttcgaacgagcagttcaacggaaacatcgtattgtttcttcagcaatgtgtaaattcttctggcgatggccgcgttctcggtctggacgtcgagaaccacttttcggtttgagaaagacaatgaaccgttcatccgaatgagggcagagagctctgctttcgcgcagcaatcctttacttcaaggtttgtaagttcttttttcgtttccgatgcaaatgacatattatagacacccccattccaaggcctgctattcttttaacaaatcaacaagtagcgaagcgactttatgtgtatcatgacggatcacgccattctcgtatgtcacaatctgatctttgatgacctcaagccccatcgcagacagatcatcaatattaaactggacgggctgtgcctgctccttcgcatagcgttcccgaatgtcgtccgggatttcctcattgttgacgaggatcgtatcgataaacggaccgcccatatgctggttaagcgcttttacatggtctgccgcactgtagtacagcgtttctcccggctgggtcattacattgcaaatataaactttttttgccggggcgtttaatatctcttcccttatcttcggaacgagaaggttcggcaagatgctcgtatacaggcttccggggccgagaataatcaggtcggcgccgcggatcacgtcaatcgtttccggaacgggttcgattttttcaggggttaaaaacacccgtttaatccgcttcccgtaagacggaatcgtcgattcccctgatatgatctgtccgtcatccatttccgcatgaaggacaacgctggtattggccgcgggcagaacccttcctctcacatttaagactttgctcatttcagtgacggcgtgaaagaaatcaccggttatattcgtcatcgccgccaaaatcaaatttcccaatgaatggccgattaaatcgccgcctttagagaagcggtgctggaacaggtcttcaacaagcggttcgacgtcagacagtgcagcgaggacatttctgacgtcccccggcgggggaattttcagctcgtcgcgcagcctccccgagcttccgccgtcatctgcgactgtcacaatcgccgtgatgtctaccggctgctgcttcaatcctctgagcagtaccgaaaggccagttcctccgccaaagattgcgatttttttctgatctgccatgctattttctgcttttcttctcgatgtcccggtgagtaacatgagtatagtagtcctttttaaaataatcggcaaggtattcagccagcgtcacagaacgatgctgtccgccggtgcagccaatcgcgatgacaagctggctttttccttctcgcttgtatgacggaagcataaagctcagcagctcggtcaatttttcaagaaacttttgcgtttcgttccatttcatcacatatgaagatacttcctggtctttccccgtcagcggcctcatgctgtcgatatagtacggattgggaaggaaccttacgtcgaacactagatcagcgtcgatcggcaatccgtatttaaacccgaatgacatcacattcacagtaaaggtatgtccgtgatctgccgcaaaatgctggacgattttttcgcgcaggtctttcggcttcatatcggatgtatcatagatgatttgagaacggcctttcagctcttcgagaagctcccgctccgtttggatgccctcaagcggcaggcccgttgtcgcaaggggatgggatcttcttgtctctttatatcttgaaacgagaaccgaatccttggcatctaaaaataaaattcgcggggtaatccaggatgtttccccaatttcatcaagcgcttcaatcaggctgtcaaaaaactcgcggccgcgcaaatccataacaagggcgactttgctcatttttgaacttgattccttcatcagctccaaaaatttcggcagcaaagatggcggcagattatcgacacagaaaaaaccgagatcttcaaagctttgaatcgccactgtttttcctgcccctgacattccggttatgatcacaagctgtatatcatggcctccattcgcgttcatgcttctctccccctcttatgtttattcgccttgcgggtcgaggcgataggacagcaattcaaagtcaggcgtatacgtaaaggtgccgtgaagcagtcctttgcctttcagcataaaatcaagaatatggacgtcgcccggcgccatcggcaagctaccgacgtcccccgcctgatgccacctgatgatgccttcttctgattcttctacatgcttgcctgtataatgatcggcgacgaatgtgaacatcatccattcagatacaacctgatcattttcctttatgataaaggtgaatattcctttcagctgcgggttcagcacatacaggcccgtctcttcgcggtattccctgataacggcgtccctgacggtttccccgctttccattttgccgccgggggccacccaccagcctcgtctgggcttttgcagcaacaggactttatcacctgaagtcagcacacaattcgtcactctttgcaaagtctgtcacccatccttttattccttcaattcttttttctattataccgtttcctgtccccgctcacaatgaacatgcagttccgccgcgaaaatcgccttttcccgggctgttttaggctttttccgggtaaaaacttaatgaaacggctttttcagcaaatggaagcgcttgcgaaaaccgttcttttattctattttacagcaaaaacgactgtttcaatattgaaatttgaacaacttgtgaaatttgtaaaaaattctctttgcaggaaaataagacaaaaaaaggacacggataagatcatccgtgccaataaaattcattataaaagggggtcaattactataccaatcataacgaataattgtttcactggtgttacaggccggttaaatcatgatgacgattaaaatgcgttattttacagccttttctttctctttcagctcttcgatatagtgctgaacgctctgtgcggcaatgcttccgtcccctgttgccgttacgatttggcgaagggttttctcgcgaatgtctcccgcagcaaaaatgccttcgacttttgtttccatctgttcatttgtcacgatgtagccctcttcatttgtaatgccgaggtttttgaaaggctctgaaagcgggagcataccgatgtagataaagacgccgtcagtccggaactcttcttcttcgcctgtgaccgtatcgaccagtgtcactttgccgacttttccgtcttgttcatgaatttccttgaccgtcttattccagagaaagtcgactttttcgttgtcaaacgcgcgcgcctgaagaatgctttgcgctctcagcttatcgcggcgatggacgattgttactttcgaagcgaaacgggttaagtacacgccttcttcaacagcggagtctcctcctccgacaacgaccagctctttgtttttaaagaaggcgccgtcacaaaccgcacaataagaaacgccgcggccgccaagctctttttcgccaggtacgccgagcttcttatattcggcgcctgctgtgatgatgaccgcgcgcgctttaaattcttttgatcccgctttgacgatcttatagtctccttcatcgacgacttctttaatatcgccgtacgcatactcagcgccgaactttttcgcatgttcaaacattttatttgaaagctcgggtcccagaatgctttcaaatcccggatagttttcaacatcctccgtattggccatctgtccgcccggaacgcctctttcaaccatcaaagtcgacaggttcgcccttgacgtataaacggctgccgtcattcccgcaggacctgctcctataataatgacgtcatacattttttcttctgacacaatgttcactccttcatgaatcttatgcttgcaagcagtgcattcctgttaaataagattcccttcttataacttccttacccatatcctataaaatatcatgaataatcgctatttttttgctcacataataaaacaggctgaacaatgaagttcacacctgtttctatagatgctcttttaatgtacgttcatactttgaaagcgttccgggcgatatttggaaaattttagcggtttcggcttttgtcaaacgctcctgatgctccgtcttccaaatgtaatagatcgctgccgcaagcccgccggcatttttcagctgaagcccgtaagccctgatctgctgaatgacatggaaaatccaaaagcacatggcctcctgctccatcgccgactgatccgcttgttcaatcgcttttgcagtcctgtaagcaagtagcgcgtcttttgaatcaacggctgcaccgatttccccgtaaagcacaagtctgacaaactgatcttcaaacggcgtttttgccatctgtgaatcaagcaccgctttcagctgggctttttccccttttcttccgctgatataatatgcggcaaggcgctcctcgagcggtcgctggacaggtctcttttccttccgttctttccacggctccatgcgggcgtcatccggatactcttcctgcatctttttccatacagaccgggcaaattgaacgcggcccgtgtaataagccgagcaggcgagccagtaataaaaggtctcatccccttcaaatcccatgcggtagagtgatttcagccatttaaacccgagatcgtatcggccgacaagggctagcgtggcaccgagcttatacctttgctcaaaaagcatcggataaatatttgaaagctgttcggaaagcgcatcgaccttatcgtcccgtcgttcatagtgataaaaaataagaagattgcaaagcgcatgcaggtttccatgacttttttccaagaccgtaaaaaccgtcgttttggctttctgaacgtccccggcataaaagtatgcgagtgcaagattgttataagccgaccaaaactcagggtaatcggaaataatttcttcaagcatcgcgatcgattcctgaagctgtccattttccagcagtgatttggcccgatcctgtttcaaaatcaggtcgtcctgatcgaactgcgaatagccctgatcttcctctcccatatccaataaatcaagcagctccgcattttcctcgctgaactcgccgtccggatcttcctttaaataagtctccgccgctttataggcctcttgaaaaagaccgaggtgcgcatagttgttcgctttaaaatagtagcattcagtcattttttcgttgatgttcttcaggataaagtccaaaagttcgtttgattgctgataaaagcccatttccgtataaataaccgcaagttgggacagcattcccgtgttttcaggttcaagaaaaatcgctctctgtatgagcttgctcgcgcgggataaatttcgctctctgtatgctttgagccctttatgataaaaatattgcccatcttggaacagctggacaattctcgaatctttatgatgttcagaagtgtactttcccacagataccctccatttcaaactatataccgtgagtagtataacatagtttccagcaggcttaacaggccaaaaacaagtttcgagaaaattctcttcattttccacatatggttttttcaccattttattccggacgtttggagcaccaggccggatagggctttcagaaggatgaaggtactttttatatcggaagtacgcttttcatcttaacccgggcaaaatctttttttagcacttaatgatgacgaatgtacgttcccattgtatgataatagaaagggggttcacgaagtgaaaaaaggcggatcaatagaattgacgcattactcagaagaacattcagctgcgcttctcgaatttgagcttcctgaagaacagcatcgatttaccgctcttccgaaagaggctttaaaacggacggacggccagtttccaatcgtaattttaagcgaaggcgagcctgtcggatttttgatcctccatgcgaccgagagggtaaaagactattcggacaacccggacgccatgctgttaacggcgctatccgtcgacagaaagcaccagggaaaaggttttgcaaaagaaggaatgctcaaacttccagagtttgtctccaaggagttcacccattgtcatgaagtcgtgctggttgtgaacgtgaaaaacaccgcggcccagcacctgtatgttaaagccgggtttgccggcacaggggaaagaaaaacagggccgatcggagagcaaatcgtgatgaaattgaacatcaaatagctcccctaccgggaaaacaaccaaaaggccaaccgccttttggttgtatgcagtgtgcttatgattcagatccttcatggcgctctttcaagacgccaagcacatcatcaagcggaagggactgctccctcagcaaaacgagcagatggtaaagaaggtcagccgcctcccatttcagttcttcaggatcacggttttttgcagcgatgatgacttccgccgcttcttcgccaactttcttcaaaatcttatcaacgccttcacggaacaaatatgttgtatatgcgccttcaggcatttcagcctgccgtttggcaatgacggtttcaagttcattgatgatgtcaaagcggccgccatcagtctgtctgatatgttcgccgggcgagaaacagctgtagcttcctttatgacaggccggccccaccggttcaacaagcacgatgagcgcatcttgatcacagtcaagcctgatgtctttcacacgctgaatgttacccgacatcgctcccttatgccagagctctccgcgcgatctgctgaaaaaccatgtctccttcgtttccagcgttttttcaaacgattctttattcatataagcaagtgtcagcacttctttgctcgctgcatcctggacaatcgccgggatcaagccggcttcattaaatgtcaactcgtctgccttgatcatcttacattcaccccgcgctcttttaaataagcttttacttcttttacagatgtttctttgtaatgaaagatagatgcggcaagagccgcgtccgcccggccttctgcaaacgcatcatacatgtggtccgcacgccctgcgcctccggatgcaatgaccgggactgaaacggcttctgacacaagctttgtcagcctgcagtcaaatccgttcttttctccgtctgaatccatgcttgtcagcaggatttcacctgctccccgctgaacggcttccttcgcccaggaaacggcctcaaggttcgtttttttccgaccgccgtgtgtataaacatagtacagatcagcttctggatcgtattttgcatcaatcgcgacgacaatgcattgagagccgaaaaagtcggcgccttccgttatcagttccggccggagaacggcagccgtattgacggaaactttgtcggctccggcccgcagtatcgttttcatatcatccaaacgattgatgccgccgccgacggtaaacgggatcgccagcttggccgccactctttcaacgacatcaaccatcgtttttctcccctcgtgggaagccgagatatcgagaaaaacaagctcatctgcgccttcatgatcatatacttcagccagttcaaccgggtcgccggcatctttcaattcaacaaattgtacacctttgacaacgcgtccatcttttacgtccaaacacgggatgattcgttttgtgatcactttgccgccaccctttcaagcgcttcagccacggtaaattggttggtataaagagcttttccgacaatagcgccagagacgccttccgaagcgcgggaagcgagcgcctcaagatcggcgagagaactgacgccgccggaggcaatgacttgtttgccggttgccctggcaagctccactgtactgttgatattaggtcctgacagcattccgtcagtcgcaatgtcagtgaagataaaaacttctgcaccttcatttgcaagctcgcggccaagctcttccgctctaacggaagaggtctcaagccacccttcagtcgaaacaaatccgtctcttgcgtcaagaccgattgcgatgtgccctccgtaggccttcagcatttttttgacaaactcggtatttgatacagcagagctgcctaggatcaccctctcaatgccttgcgacaagtagtcatacacgtctttttcggtcctgatgccgccgccgacttgcactttaacgtcaagcttatcagcaatgcttatgacgtggccgccgttcacttttttgccttctcttgcgccgtccaaatcgacaagatgaatccagcttgccccctcttcagcaaaccgtgaggccatctccagaggggaatgaccgtaaatcgtttctttttcgtaatctccctggatgagcctgacgcacttgccgtttcttatgtcaatggcaggatatacagtaaactcgctcattttttcaccttctgttcttgtgtaaactgcttgaaccgctctaagatcaacatgccgaccgtactgctcttttccggatggaactgggccccgtatacattgccaagaccgacgacagcgggtacacacacaccgtattcggcgcttgcaagcaaagcttcctcttcgattccgctgacataatacgaatgaacgaaatacgcgaatccttctttcgcttttggcaaaagcggcgagtcgcggtggactttgagaagattccagcccatgtgaggcacttttaagcgatttcccgcttgatcacagtctttcagtttaacgacttttcctttcaacaggccgagcccttctgacgccccgtgttcttcgctttcttcaaacaaaagctgcatgccgaggcatatgccgagaagaggttttccttcgtttgcggcagcttgaataaatgttttcaggccggtctcggttaaaatctccattgcatcccgaaaagcgccgactcccggaaggatatagctgtccgctctcttcagttcatccggatgctcggacacaaaataaggggcatcaatccgttcaagcgctttagaaacgctgtacaggtttcccattccgtaatctatgacaccgatcatttacagcattcctttcgttgatggaattcccttgacccgcggatcgatcaatgccgcttcatcaagcgcacgtcccagcgctttaaaaatggcctcgatcatatggtgtgtgttcgtaccgtaatgaacgatgacatgcagattcattcgcgcttccagtgcaaacttccacaaaaattcatggacaagctctgtatcaaatgttccgattttcctgcttgggaattcagctctgaactcgaggtgcggcctgttgctcagatcaatcgcaacctgggcgagcgcttcatccatcggcaccatgctcgaaccgtagcgtttgattccttgtttatctccgagcgcttccaaaagcgcctgtccgagacaaattccgatatcttccgtcgtatggtggtcgtctatttcaacatcgcctttcgcttcaattgaaaggtcaaactgcccgtgttttgtaaataaatcaagcatatgtgtcataaacgggacatccgtttgaatatccgcttttccttctccgtcaatatgaaaggataatttaatatcagtttcattggtttttcttgcccgttcggcttttctcatcagtcttcctcccggtttctggattcaattgctcttgcatgtgcttcaagcccttccaatctggcaaaggccgcaattttctcagcattcgcgcggaaagcttccctgctgtaggaaatgatgctggagcgcttttggaagtctgtcacatttagcgggcttgaaaatctggctgtaccgttagtcggcaggacatgattagggcctgcaaaataatcgcccaccggctctgaactgtagcggcccaggaaaatggcgcccgcatgtttgatctgtcccagcagcgcatcgggttgaactgttaaaatttccaaatgttcaggagcgagctcattgatgacggaaactgcttcattcatcgtctctgtaacatagatcaggccatagttgtcaatcgactgccgtgcaatctcttttctcggaagatgttcgagctgtctgtaaacctcttttaaaacggattcggcaagcgtctctgaatcggtgacaagaatgctcgatgccatcgcatcgtgttcagcctgtgaaagtagatctgcggcgatttcccggtagtttgccgtactgtcagcgagtatggcgatttcacttggacccgcgatcatatcgatatcaacctggccgaatacttcccgtttagccaaggcgacgtaaatatttccgggtcccgtaattttatcgacgggggtaatcgtttccgttccgtaagccaatgcggcaatcgcttgggcaccgcccattttgtaaatctctgtgacgccaagctccgcagcagcagccagcactcccgccgacaatttaccgtcttttcccggaggtgaggcaaggacaatgcggtcgacgcctgcaacaagcgccggaatgacattcatcagaacggatgatgggtaagcagccgttccgccgggcacatacacccccgctgaatcaagcggcgtaattttttggccgagcatcgttccgtccttgcggtggtaaaaccaagatgttgcgagctgacgctcatgatattctttaatgttgaaaatcgccgcctgaataatctcgagatcacgttcttcgagcgcgctgtatgcttccttgatttcctcttcggaaacgcgaaagccggccacatccgctccgtcaaattgtcttgtgaatgcggaaacagctgcatttccgttctttttcacttcttcgataatgccgcggactgcttttctttgttcctccgttccggcgtcaatagagcgttttagtgaaaccgacgtatttccgctgatggatttgatcttcattttgctttttccccttccacaataagagaaagtcttgaagccatttcatcgatgactgcgtctttcattcgatagctgacaggatttacgattaagcgggatgtgatgtcgcaaattttttcagtttcaactagcccgttttcacgcaaagtctgccctgttgatacgatatcaacgattcggccggcaagcccgatcagcggagcgagttcaatcgacccgttgagcttgatgatttccacttgttctccctgttctctgaagtagcttgatgctacattcgggtacttggtcgcaacccggggcgcaacggtgtctgccgccgtctcgggcaggccggctacggcaagacggcatttgctgatgtttaaatcaagaacctcatagacatctcgttcttcttctagcaagacatctttgcctgcgattccgacatcggccaccccgtgctcgacatatgttgtgacatccatcggcttagcgaggataaagcgaaggttttcttcaggcacttgaatgatcagctttctcgaatcgtcgaattcttccgggagctgatagcctgcttttcgaagcatatcggccgcttcctcaaatatccgccctttcggcatcgcaatcgtcaattccttacccatgcttctcttcctttctggctccgataaaataggtcacgttttgaaaagactttgtcatttgatcaatatctccgattcccgctaagtcctgcatgacgacttttttgccttttcttcgttcttcttcggcaaatctgattgcctcttttctctgttctgtgctgaagatgacgacatcgatcttttcttgttcttccgccggcttcaatgcttccagcagcctgtcagtcctgatgccgaaaccggttgccggtgcgggtgagtcgaagcggccgagaagctgatcatatctgccgccgtttccgatcggaaagccgacgttttcagcatagatttcaaacaaaacaccggtatagtagctcatatggctgaccatgcctaaatcgagcttaatgtcgtctgtgcaaccataatcgccgagcgtatcccatagcgtttcaagttctaaaaccgcacgttttcctttttcagaatcgacgatggatgccgccctgctgcacgtttcaataccgcccctcagctccaaaagctccagcagcctgcttttatcaattgaggataaattgagggattttacatgctcccgatagccgacatagttcttttcgtataaatagcgccgcaggacatgagccctttcttcattccctaaaacttccacaaacaaggcgtctaaaataccgacatggccgatcgagattttaaatgaagtcaggccggcatttttaagcgaaaaaatgacgagcgcaatcacttctgcgtcagcgcttgtcgatccatcgccgatcagttcaacgccgacttgctcaaattcggcggggcgtcctccttcacgctcctgtgcccggaacacatttgcagcatagcctactctgagcggatgatcgtctttatgaagctttgaggccgccaccctggcgattggagccgtcatatcaggccttaacacgagcgtctgcccctcctgatcaaggagtttaaacaactgctgatccaatatggccgactgcacaccgaccgtatcataaaattcaagggcaggcgtctccatgaactgatacccccacaaagccatcacctctgttaatgaagagcgcacctttttctttgtttcgtaaagcataggcagcgtatcccgcatgccatgcggtttttcaaacataaacatttacacttgcacccccataaccgtttgaaggaaaattccgaatcctttagttcgctaatatgataatatgctaacagataaaagaatcaaaatcaacagccgctcataaaatagacgcctgcaccgtatgggaaatgataacttttatgtaatgaacatcttgatgttataatatatatacgatcgcaaatctttgccttaaccaaaccagcaacgggaagacaggagactcagaatgaaatttttcaaaactcttttttttatttttttcgtagcagttcttatgaccgccgttcttatactgttttctaaagatgcgttaagcccgttagccgaaatgttgcacagcagccataaaactgctgctgacaatgcgaataataaaggagagcgtcagccgcttgacgttccgctgatcaaccaaatggacccgccgaagctttataacggctgtgaagtcgccagcctggcgatgatcttaaactacagcggatatagtgtcacaaaaactgaacttgccaatgaggtgaaaagagtgcctctgcaatatgaaaacggcttaaagggaaatcctaacgacggctttgtcggcgatatggaaaacggacccggactgagtgtctaccatggcccgatttacgatttggcccattcatacgcaggtaataaagcggtcgatctgacgggaagtgagccgggaaaaatttatgaacagctgaatcagggcagaccggtttgggtcatcaccactgtacatttcaccccagtcaacgatatggaaacatggaatacaccgtcaggcaaagtcgatgtgacgtacagcgttcacagtgttgccgtgacaggctatgatgagtattacgtttatgtgaatgatccgtacggatataaaaacagaaaaacagacagagaaaattttgaaaaatcatggaaacagatgggcagtcaggcgatcgtgatcgccgcctaaaaaggcagattaatccctgcctttttttagttctttcagcccttattaaattaagccgctttacccttttgataaatccaaaatacagaaaacaacctttctgcacatgtttaatttactgttttttcataatattcaaaatacttgtttacattcagcaagctcgcatatatgatagtaccgaaataggtgtctcattttattacataatgaccagaaatcactttcatttaagggagacacacacctgtttcaaaaatatttcttgaggaggatggaaatgatgaagagattagcaggtacggttattttgtcaggtttgctcgtatgcgggtttggacaggctctgcctgaaaaagctttggccgccgaggtcgttcacaaaacgatcgtagtcgagaaaggccaaacgtatgacggaaaaggcaagcggctgattgcaggtccggagctcggggacggcagccaacgcgaggatcaaaaaccgattttcaaagtggaggatggtgcaacgctcaaaaatgtcgtgcttggcgctcctgctgctgatggtgttcacacatatggaaacgcttccataaacaacgttgtttgggaagatgtcggcgaagatgccttgactgtcaaaagcgaaggaagtgtcacgataaacggaggatcggcccggcttgccgcggacaaaatctttcagattaataaagcgagcacatttaccgtgaaaaattttactgccgatcaaggaggcaaattcattcgccagctcggaggctcgacatttaaagccgtggtcaatattgataactgtacgattacaaacatgaaagaggcgatcttccgaaccgacagcagtacaagttccgttacaatgataaatacaagatactcaaaagtcggtcagaaatggatcggtgtgaagcatgttacggaaagaaacaatcatgaattttaacactgattgcaaataaaggcccccgctctttattcagcgggggtctccaatcttttttccatttcttcttttgtatagatcagccgcatcggattgccgccgacaaaagcgcccggaggcacatctttatgaacgagcgtaccggcggaaatgacggcgccgtctccgatctcgacgcccgggaggatcgtcgtattggctccgatcatgacttcatcgccgatgatcacctcaccgagccgatattcttttattaaatactcgtgcgccaaaatggtcgtattatagccgattacggtgtttcgcccgactgagattttttcgggaaacatgatatccggcatgaccattaaagcaaacgagcatttctctccgattttcatccgcaaaaacgtccggtacatccagtttttcattccaagaaacggcgtatagcgcgccgcctgaatgacaataaagtttttgactactttaaaaaacggaaccgtctgatagatgtgccataaggaattggcgccggacaccgggtagcgcttcgtttttctcaaactttctccaccccaagaatgtgaaggaggtcgctcatttgctgaagcataaaatcaggctcgtgtttggccaggctttcttctcccttaatcgtccatgcaacgcctgctgttttcgttccagcattcttcccggctaaaatatcgtggtaattatcaccgatcataatggcttcttccggacggctgccaagcttggaaagggcgagcaaaacaggctcggggtcaggcttcggccgctcgacgtcatccagcgtcacaaccgtctcgaaaaaggcatcaagcccagtcagtttaagccccatgatgacggtgtcccgcagctttgtcgtgacgatgccgagcttatagccttcttccgcaaggcgttcaagcgtctcgtaaaccgtctcatactcggttaccagttcatcatgcatctgatgattaaatgtccggtacatggtgatcatttcttcagccttatccttttgaatgcttgagaacgtttcataaagggaaggtccgatgaaagcaagaacatcctcccgtttatagcgtcccggtgcataatgatcgagcgtatgcaaaaatgaggcgataatcagctcatttgtattgatgagcgttccatccaaatcaaataaaaccgtattaactttcatacaaagcttcctttctgcgaacggaataacccggctttctccagaagcgcgaaatcgcgatcgtcagcagaaccgcggtcgcaagcctgatcaacaaaagaggccagaccggaatgccgagcgggataaataccaatgtatcttcaacaaccgcgtggcaggcgacgagaaaaataaaagcaagcgtgacatcccttttgctgacgccgtcttcttcgaccgctttgatcataacgccggccccgtatgcaaggccgatcgtcagcccggcaaccattgtcattgaggtgttctctttcattccaagcattctcgttatcggtgcaaaccactttgaaaaagcattcagccagccgaggtctctcatatattgaatgatgatcatcagcggtattacgatggctgcaagctgaaggacaccaagacccgccttggtcacggcttctagcgcaatgtcaaaccagccggaaggagcggcgcttttcgctgagattaagccgtatttggccgcatcctgcccgccatgccagacaaggttgatgataatggccgaaaaaacagcgagaccgatgcgcacgagcaaaatcagccatattttgattccgacccttgaagcaacagtcgactcgataatcaagttgtggcaaaacgacagcataaccgctaaaataaacacttctttaacggtcaaatcaagcgttaaaattcccgcaattccggcatacaagttcagcatgttgccgagcacaagcggtatcgccgcttcccctgacaacccgaaaatccccatcgccggcgtgatcagtttgatcaaccagtccatcaccggtgtatgctgaagaaggctgacaatcagcgtgacaggaaaaatcacttttccaagcgtccacgttgttttcagccccgccacagcgccggcttttaaagttcccttcattgttgtcctccccttagtaaagtcgctacatctcctgataccgtttaatctctctgcctttgaaacgtctgtaggctatcagcgcagctgcacagaggatcagtacgatcgaaataacctgtgcgatgcgaagattctccgtcagcatcagactgtccgttctaaggccttcgataaagtagcgtcccatcgaataccaaataacgtagattaagaacagttcgcctctctttaaattcgcttttcttaaaagaagcagaacaacgactcccgtaaagctccacagcgattcatacaaaaaggtaggctggtagtattgtccgtcaatatacatttgattgatgataaaatcaggcaggtggaggttttctaaaaacgctcttgagaccgcctcaccgtgcgcttcctggttcataaagtttccccagcgtccgatcgcctgaccaagcagaatgcttggagcagcgatatcagccagcttccaaaacgaaagccccttgactttcgcataaatgattcccgtcagcacggcgccgatcagtccgccatgaatcgcaaggccgccgttccatatttgaataatctggtcaggatgttcactgtaataaccccattgaaaaatgacataatatgctcttgcacataaaatggcaatcggaatcgcaaaaagcaccaaatcgacaaaggtgtctttatgcagtcccctccgttcgccttccctgactgccagccacaaaccgagcaaagcgccaaggccgatgataataccgtaccaatggacagcgatcggccccagttgaaaagcaatcggatttaatggttcaatcgtttcattcatattgtcagctcctattcttcaagctcaccatcttcaattacatccgcaagcttatgggtaaattgctccgcggcattcagccccattctcttcagtctgaagttcattgcggccacttcgatgatgacggcaaggtttcttcccggacgaaccggaattgtcagctttggaacgtctgtatcaataattttcattgtttcttcttcaagccctaagcggtcgtactgctttccttgctcccaaagctccaagctcatgacaagggtaattcgtttaaagcttctgaccgcccccgcgccaaataacgtcatgacattgataatgccaagacctctgatttccaggagatgctcaattaattcaggcgcgcttccgatcaatgtatcctggtcttcctgtctgatctcaacgcagtcatccgccacaaggcgatggcctcttttgacaagctccaaagccgtttcgctttttccaacgccgctctttccgataatgagcaccccgacgccgtaaacgtcgacgaggacgccgtgaatcgcagttgtcggagccagctggctttcaagaaaattcgtcagacggctcgtcaggcgcgtcgtctttaatggggaacgaagcacaggcacgccgttttcttcggatgcctccacgagttcaggcggaatcggcaaatcacgggaaaggatgatagccggtgtaatttccgtgcataacgacagcatccgctgctttttttcctcctctggaagcttttcaaaaaaggtaatctcagtcttccccagcagctgaaccctctcttttggatagtatgtaaaataaccagccatttcaaggcccggtcttgataaatcgctcatcgtaatcgggcggttgatcccttcttctccgctgatgagctcaagcttaaatttatccatcacatcttttgttcgaactttcggcacgattgatgcaccctcctcttctcagatgaagaactagacattcagctttattctatcactttcaaaatgaacctaaaacattttttgataatggcccccttgacacttcgatgaagtgctttctttcaaagcgaaaaatcagtagtatgtaaagaggaacgcgaaaaggaagtgaagaaccgttgaaatacaatattcatgatacaaccgtgctgaacgaagacattttgacaccggaagaaaaagagacatgggttctttatatgaaagtactgactgctgccggcttgggggatgtctccgaatggatgaagctcgatctcagcatgccgcaaatgaaggttttaatgcttctgaacaaccacggcacactgaaagtctcagaaatcgccgaaaaaatgggagcttccctttcgaatatgaccggactgctcagccgccttgaacaggcgaactttatcaaaagaacacattccgagcaagaccggcgaacgattgtggttgaattaaccgaagatgcgaaggggatttttcggagcctttacaaaaaagggcatgaaaagctcaaaagagcgcttcagaagctgaatgaacaggaaaaaaacaaagtgaatgaaggccttacaattcttgaaaaagcgttaaaagccgatgatgaatagacaagctgcccggaaaccggtgcagctttttttgttgaaaaatttcttttgacaaaacgtgcttttttaaggatgataaaaataattcattcaaagtgaattattcattcgaagttaatgaaaaaggaggatacgtggcgtgaaccaaaagtgggctgtattattgtttacgatcggcgtgtttatggctgctttagacaacggcatcatttcagcggcactgacgacaatcaatgattcttttcaagtatccccctcatggggagcatggggcatcacgctttatacgctcggtttggcagtcagcgttccgatcgtcggaaagctgtctgaccggtatggacgcaaaaagctgtttatcatcgaagtcttgctgtttggcgccggttcgctgctcgttgcattgagccaaaacttcccgatgttcttgttggcgaggctgattcaatcgcttggcggaggcggaatctttattatcgggagctcgcatattctcactgcgctgcctaaagaaaaacagggaaccgccttggggcttttaggtgcgatgaacggaatcgcggcagtgctcggtccgaatatcggcagctttattttggatatgaccggaagctggcactggctgtttttgatcaaccttccgattgccgcagcactgatcatcctcagcgttccattgatgaaggagacaaaaggcggaacacgaaaacccctagatctggccggaactgtgatattgtctcttgcgattttagctgtgatgtacggaataacgaatataaacggacagcgcctgtctgccgtcttgtccgatccaaaggtttacttttttctcctgatcggctgcgcgctgtttgcgggactcattttttacgaaaagcgcgtagagctgaagggaggcgacccgatccttgcctacagtttattaaaaaacaaggtgtttcaatggacgctttttatcggatttttatccggcggactcttggcagccgttatttttattcctgcatatgcggaacaatatttgcacgtcgctcctgaaaaagcggggtattggatgacgcctcttgcgctggcttcagggataggagccgggctcggcggaatgctcgccgatcgaaaaggaccggtaaaggcggcccggctctctggcgtcatttcgttcgccgggtttttgctcttgtcctcctgggtgacagagaagtgggaatttgttttggcaagcatcatcgcaggggtcggttttggctttctgttaggcgcgccgttaaatatgcttgtatccgaggcggcaaaacaggattacgggacagcgctcggtacattatcgctcgtcaggcagatggggatgaccttggcgcccgcgctgtatgcaggatatataacggccggctacgaaaatatcggcacacatatcaaacataagctgaatgatgcagggatcactctgaaggggtttgcaggcggtgagacggacgtatcgcggctgagcgaatccctcagccaaattcccgacccaaaagtaaaagacatcataagcgaagcgatccatgaaagtgtgggagcggggttttttaacctctacttcacagccgccgtcctttcacttgcagtcattgcttctgtcagcgttttatcgctttataggaaaaaacaaaccgacacggcaagccgtctaaaaaaagacgtgacaaactaaaaagcatttgctccctcttaggaaaacaaatgctttttgcgttcgcaaaggaaaaccgccgccagccacaagctgatttcagcaattgggaggtttgtccctttctttaaaatcatcccggccggcggggggctccccgacaattgcctcagggccgagcccgccccggctgtttgatctattaaaaaggatttcatgccatcgtcttttgtcgtcaatctccacatttgagacctgctgttgccgccgtattgatctgaagctgcggcgtaccagaaataggttgtattcggctgcaaatctttccacgtcacggaagccgtctttccgcttttcaccgtttttgctttcccaatttccttgttcgaaaagacattcagctcaaaataatcagttttaacctttttcttcctcggtttcagatccgttttaatgttgaactcgtccttcgggccaaattggtgcggatcataaaagttatagtcatcaagatatggcgaatacgttttgacatggatcgtgtcatgcttcggatccacatggagaattcttaaataaccttggcctccttcaggaccgccctgatagtcggcaagcatttgataaaccttgcgatccggcttgccgtccccgttatcatcaagcttgtcgacttttaagttggagctgtgatagtgaccgctcaatacggcaatcacattcggattccgcttgatgatctgttcaaatattttctccccgattggacttctgcttccgctgacaagcaaaaactcgtgaaatgccaaaatcgcttttcgatcgggatggcgtttcagaacatcatctatccactgcagttctttttttccgattccccaccccatcgacaccatgatatagtcgttgcccccgctggaaatgaggtcgtaatgccctttgttattctgataagacccgccgtaatgcggtttttgtttaaaacgcctctccccgaagtacctgccgaatttcaaatatgaccggtctttatggctgacatcgtgattgcccgccagcacgccgtatggaacttgattgtcgtcgagaactttcatgaactggtcggcgcgcttccattgcagcggctgatccgcttcatccacaagatcccccgtatgaaagacgtactgaatgttcagcttgtccttttgttccgcgatccacttgacctgacgttcaaaaatgtgcggatagctttccgaataatattgcgtatcagacatccacacaaatgtatagtcattttgcgaaagctgaatttgatcctgaatgatgatgctcgccttggattggcggatataatcggcggcttttatgcttcctttgagggtaaaaggtttgccatcctttgcaacatggaatgcaagcgtctcccacctcttgctggcccagttccaggcgaacatggagacttttctgccgggaagcgaactcccgcgccacagcacttccaccttgtcgttcggccccgtattttcatccacttttacatcaaagcgatggtacggaaactttgttgttgatgaggtttcaaaaccttttccgtcaagtgcggacatgccgctgcgctcttcttttgtcagcgccttttcccccctgaccgcaaagctttgcggaggttccgtcccgctttcgttcgctgacacatcaacatgctcttcgtcttttactgtgtactgaaatccctgatggaatgacactttcatcttatcttttgtcgggtccttgacgcggacggcgagcttagcatgtgtgctgccgggtgtatttttgacccgagcgggcttgtccggcttttcctctttaatgtaaaatgccttttttacgattgacaggttgccggcgctgtcctccgcttttattttcaactcgtgctttcccgcatccaggcgggcagaagatacgagatagggaagcgcaatctttttgccgtcaagaaaggcttttatgcttttcatcccgctccatttatcgtgtgcggccgcattgatctcaaacgaccctttatacgtcctgccgtcttttaatgacgttttgatctcaggacctgtgttatcgaccgttaccctgcggatgagcctttcttcgccattctccgcttcaacgatgtgctgcccttcgttccaggcgcgtgtatgccattgactcgcaagcgatgcaaacttggcttccggaatcgtaaaacggaattcataccattcatgcgccccagggccgtcaccggccggaagctcggctttcggatcgtcgtatcgctcatcgcggatgatggtcccatccgcgagtatgaggcgggggttcttgaggacaaaatcatccctgttttcttctgcagtttgttcaaatggtgttgatttcgtacctgaacgaactttaatcgaaaacggctttccttttttaaattcatccggagaaaccgggaccgtaattgtcgcataccggcggcgcgaatcgtcaaaaactttttgaactctcctgccgatcgttacagcatttttaaaatacagattcgtttgattgacatcgaaagcaaagtaggcttttttttcaagcgccggttcaccttctttttgttcaatcccgtcaatacgaattgtcgtttcagaaggcggcttttctgatgtggctttcaacagcatttttccggaaacggttccgccttcgcttacattcagcctgagtcccttcaaaatgcgctgttcgagcggtatcgttttcttttcagtcgacgaaacatttgatccatcaccggcccgcatatagtactccactttttctttgccaatgagttcggcaaaatagatattgtggcggtacaggccgtcattgcggcttttttcaacacggacttcggtaaacggctcatcatcattcatgcggtagaaaaactgcgcctgcttcacttgccgattgtctttcatatcagctaagagctggatcgtttcacccggttttacagcttgatgatccgtcatatcatggatctccggcttttctctgtccggcataaccgtcaccgtctgtgaaggtgcctgcgtcttcagaagcgaaccaggcgacggtttttcttccccggccgatatgattttcatatgcttcgttccgtccagcggatatcgatacagaagcgctttatttttggcgacatcggttttatccggctcgctttgataacgggcggatgcgacctcttctccgctgtttgtgcagatgatcacctctctcggcgccgtattctccatgccgccccctttgagagcagtaagcgttttgccttcacgaaggtgaacaccgtaataccgattgaaatcactttccgtcagatgaccgtttgagcggtttttcacccaaaacacgtgtgtttgaccggaaggaatcgccacatcatcgtgctcaaaaggccagatgacgtctgattccttgcccttttcaggatgtctgtacttgattttgtagctgttcagatgaacagctttattggtattgttataaacttcaataaattcatagccgtcctttccaccggtgtttgacgtgtcgactaccatttccgtgatcaacagctccggaagcttttgtgtatctgtacgcatgcctttcagggcgacagtatacacatccgtcttcacagaggagtcgccgacttgagcttcaatgtagtactggactttgccggatgctatggattcgctttccaatttggcaatataggcgttctgtctgcccggctcaacttccatcggaatcgcccgatacggcaattcgtcatgctgcttgtaatataaaatgaccgtgtcggcggccgcctgcgcggaaaaatatatgtcatctcctttttgaacttgttcaacaggagtatgcctgataaccggtgaaccaggctgaatatgctcttcacccgatgcggacgaaatcgggatctgcaaggcaaaaagtaaaactgcggccaacaataaaagggtttggcgatttctgtactttttcatcgtctacctccctttcgtattttgcctttacagatcatttttatgaaagagacatccgggcaaaaaaaagaagcctgatgattcatcagacttcaacttattttctggacatcggttcgataattgctttttgaatgagcaagtgaaaaaccgacaggacgatcgacgcaaaaatggctgtcccaaagccgtccaggtcaaaactgtcccccataatggacgcggtcatataaagagtgatcgcattgatgataaacaaaaataaacctagcgtaattactgtgacgggcagcgtcaaaatcaccagcacgggcttcacaaacatatttaagatggataaaatcaagcttgccgtaatggctgctccgatgcttctgacgtgaaccgcatcaaagtaaccggcaatgacaattaataataaggcattgacaagaacgtttataatccatctcatcatctgttgacgtctccttcattcggcacaaggaatacccagacaatataaatcagcaggacgggaactccggtcgaaaatataaataatagaaccgtaatgattctcagcaatgacgcatccatatttaaatattcagcaagacctccgacgaccccggcaatctttctgtctgtttcggatcgaaatagccttttcattgtatcactcctgtgtatggtttaaatggatcgatcctgtcttcgattccaaaaacacggtcatgctatgatcatgattttgatttgcttttaggtacatttccttctggattgtctcgtttttttcctttaaaatttctgcatctgaaagatcatgagacagagaaccgagattgcttttcagctccgctgtaacagcgcagtcccggggaacattcaactctacgcttccagtcgttgttttcacatatgccgtccggcagtgcggatttttgactgttgccgcgatattgccgttaaagctctgcaggtcaagcgcctcgcatgaacctttaaggtcgatcaatccattgatggtttccgcttcaatctctccgcaagtatggtcggctagtttgatttgtccatttgcagtttccaatgaagcttttcctgccgtgagagcagagaacgacagcacgccgttcgtcgttttggcggacagctcttttacgtttaaatgttcccctctgaccgggccgttaaacagtttaaagcggattttgccgtactctttgtccggtatatagacggtaaggttggtcttcatcgtttttttctcggtacggatcatgaacttatcgccttccacaccgcagtcgatatgctggagaaaagcctgccttgcttcatcctgattttcagcccggtacacttttgcctggcattcgactctgatgtcggaatcgctccatggtacaaggttgacgctgccgttggcaagctgaatatccagagtcgaaaaatcagtgtctttaaactggaatatatgctggacatcgtacgagtgcccgaaattcaaatccaagtctgcttcttttactttttttacagcggtatcaatccattcgaacagttttgaaccgatcgaaggcttcggttcttttttcttttcgctgtagaagtcctccgaatcaatgacatcctcagacagggctgtcaccttgctctcggtttccttgtagtcttcttcaagtttttcgatcaggatcagcgcctcttttgcagacagctttccttcctcgaccaattttaaaattcgttctttctcatgcttcatgaaaagctcccccgttctccttcttttaggcctgagtcagcattttaatcccttgaactacgttccagaccacaataatcaaactgatgatcccgaaaaaaacgaaacctccgatcatgaaaatgaccgccaaataaccgccgtcaccaaagataagcgtaccgcttatcgcgcctgctgccaatatgactacgcttataaacggaataatatgcgaaataagcgaacgcatcgcatgctttttcgtttcttgatcatctgttataaaatacgctgcgattggcaaaataagcggggcaaaaaaaacactaaaataacaaattgaagaaatcagcgcgttgtttctcgtcatacataacactccttatgatgtaaaccgttctttgtgagtctaatgtacagtgaccttatacttagtttacgtgtatcatggcctttaggtttcattttcattcgatcggcgtgcgtcaaacttcgcaaattgatttttttagattttatgaatagattctttttttataaccctttaaaatatgtggcaaagccaatgaaaaggagcgagcgttatgaaacagaaatcggaagtatacgcctcatccgcctcccagcttcttagtctgattcaggaacaaaaaaggatgaatcaggagatcgtgaaccgattggaatcgatcaattccgctcctccgctttccagcgaaatccgctatttaaaggttctgctgaacagcagcagcacccatattttaaacagtatgagtgaagcgaccaaacacatcagccggactgaacgttaaccgttttcatgatattttaaccagatttccgtcgggatctctgatataaaccgaaacgaccggcccttcagcgcccattcgctctgcggggccttcttcaattttaatggacagcccctccagatgacgaatcacatcatcaatgccggcatttgtatgaaacacaggtctgcggagccgggcatcgggtgctgtgccttcggctcaaactattttccggcttcgtggaggtttattttttgcctgccgaatgtcgcgcttttcttccttctcgaaaagtgaccgcattcaaccccggcacacggctgtaaaaatcacatgtcgcatcaatgtcttttacagtcagtaccaaatgatccatgcgatcgatcttcatcaccccatccccctttattgtttgtttttttacgttataacagctattgaataaaagagcaatgaaaatctttttgaacaaagcttgccgcggatcattcggccattgaaaaagctgccgacgtgacatcggcagctttttctttacggtctgacagcttctttttcttgaagccgcttcttcattctgtttttgtcgcgttcaatgatcggttttaaataacggccggtatatgacccttcgactttcacgacttcttcgggaggtccggcagccacgatcattcccccgccgtctccgccttcaggacccaagtcgatcaaataatcagccgcttttataatatctagattgtgttcgattacaagcactgtatctccattgtcgaccaggcgctgcagaacggccaaaagccttgcgatatcatcgacgtgcagtcctgtcgtcggctcgtccaaaatataaagggatcttcccgttgaacggcggtgaagttcagatgccaatttgacccgctgcgcttctcccccggaaagcgttgtagccggctgtccgagcgtaatatagccaagaccgacatcatagagggtctgcagcttgcgcttgattttcgggatgttctcaaaaaattgaacggcattctcgaccgtcatctcaagcacgtcagagatatttttgcctttgtacgtaacctgaagcgtttcacggttgtatctctttccgtggcaaacctcacaaggaacgtatacatcgggcaggaagtgcatctcgattttaatgattccgtcgcctttgcaggcctcacagcgtccgcctttgacgttaaagctgaagcgccctttcttgtatcctctgactttcgcttcattcgtctgggcaaacacgtcgcggatgtcatcgaacacgccggtatatgtggccggatttgacctcggcgtccggccgatcggagactggtcaatatcgatcactttatcgaggtgctcgattccttttatttctttgtattctcccggtttcgtcttagcccgatgcagcttctgagccagcgttttgtggagaatttcattaacgagcgtgcttttccctgatcccgataccccggtaacagctgtgaacacgccgagcggaaatttcacggaaacatttttcaagttgttttcctttgccccttttacctcgataaagcggttgtcaggctttcttctctcggcaggaagaggaatgaattttttccctgaaagatattgccctgtcagagattgatcatcgttcatcacttcttccggcgttccggcggagattacttctcccccgtgtacacccgcgccgggcccgatatcgattaaataatcggcggcaagcattgtatcctcgtcatgctcgacgacgatcaatgtgtttccgatatccctcatgtttttgagcgtctcaatcaggcggtcgttatcgcgttgatgaagaccgattgacggctcatcaaggatgtaaaggacaccggtcagccttgagccgatttgcgttgcaagcctgatccgctgcgcttctccccccgacagagtgccggctgcgcggctgagcgtcaaatagtcaagcccgacattgttcaagaatccgagcctttcttcaatctcccgcaaaatgaggttggcgatcttcatgtctttttccgaaagatcaagttcacggaaaaattgaagggcgttagctaccgacatttcggttatcttaccgatgtgaaggccgttaatcagcacggcgagggattcctttttcagacggtagcctttgcatgaagggcacggctgattagccatatatttttccatcagttcacgaacataatccgagctggtttctttatagcgcctttcgatattgcggatgacgccttcgaactcaatgtagttttcccggacttgtccgaagtcgttttcatatctgaaataaatctgctcgcctccgctgccgtagaggattttctcaaggtggtgcttcggcaggtctctgaccggaatatccatatcgattccatagtggctgcataccgcttcaagcagcttcggataatattgggagctctgcggttcccaaggtgcaatcgcattctcctttagagacagctcatcgtttggaatgacgagctctacatcgacttccagcttggacccgaggccgtcgcagctcggacatgcgccgaacgggctgttgaaagaaaacatcctcggctccagttccccaattgaaaaaccgcagtgcggacaggcatggtgctcgctgaacagcagctcttcctgcccgatcacgtcgatgatcacacggccttcgccgaggcggagcgccgtttcgagcgagtctgtgagacgggcggttacgccttcttttatgacgatgcggtcgacgacgacttcgatcgaatgctttttattcttttcgagctcgatgtcctctgagaggtcgttcatttcgccgtcgatccggactctcacatagccttgttttctgatttgttcgagcactttcacgtgcgatccttttcttcccgagacgatcggcgcaagcacctggatcttcgtccgctcgggataatccaaaattctgtccgtcatctgttcgatcgtttgcgaggtaatttcaatgccgtgaacagggcaaaccggctttccgattctggcaaacagcagccggagataatcgtagatttccgtcaccgttccgactgtcgaccgggggttccggctcgttgttttctgatcgatgctgatcgccggcgacaggccttcaatcgcatcgacgtcgggtttgtccatctgtcctaaaaactggcgggcatatgcggagagagactcgacatagcgccgctgcccctctgcatatatcgtatcgaacgcaagggatgatttccctgatcccgaaagacctgtcaaaacgacaagctgatccctcggaatagagacatcgatatttttcaggttatgggcccttgcacctttcacctcaattcgtttcgttgccattttctattcatccttccgattttaactctaggagcaagtcgcgaagctcggcggcgcgttcaaagtcaagcgcttttgccgcttccttcatgtcgctttccatttgagcgatcactttttcccgctctttcttcgtcatcttcgaaagcttcggctcctctttcacttgatattcttcctggtcttcagcagcatgagttgcccggatgacgtccctgatctttttgttgatcgttttcggcgtaatgccgtgtttctcattataagcctcctgctgttcgcggcggcgcttcgtttcattgattgcgatttccatcgagttggtgattttgtcggcatacatgattacgcggccttcggcatttctggcggcgcggccgatcgtttggatgagcgagcgttcggaccgcaaaaagccttctttgtctgcgtcaagaatggcgacgagtgaaacctcaggaatatcgagtccttccctcagcaggttgatgccgacgagaacgtcatgcttgccgaggcgaaggtcgcgtatgatctcgatccgctccagcgttttaatctctgaatgcaggtacgtgaccttgataccgatttccttcagataatccgtcaaatcctcggacatttttttcgtcagcgtcgtgacgaggacgcgttcattccgctcgattctctgctggatttcaccgatcagatcatcgatctgcccttcaatcggccttacctcaataatcggatcgagcagccctgtcggccggatgatctgctctaccatttcaggcgtatgctcaagttcataaggccccggcgtagccgacacatacacgatgttgtgaatgtgcttttcaaactcttcaaacctgagcggacggttatccaaagcggaaggcagcctgaatccatgatcgacgagaacctgttttctcgcctggtctccgttgtacattcctctgatctgcggtatggtgacatgcgactcatctatgaccatcaggaaatcatccggaaagtaatcgagcagcgtatatggagtcgaacctgccggacgaagcgtcaaatgtcttgaatagttttcgatgcccgagcaaaagcccatttcgcgcatcatttccaaatcgtatctcgtccgctgttccagacgctgcgcttcaaggagcttgccttcttcacgaagcgctttgaggcgctcttccagctcctcttcaatgtttatgatcgctttcttcatcttttcttcccgggtgacgaagtgggaagccgggaagatcgcgacgtgttccctctcccctaaaatttcgccagtcagggcatccacttccctgatccgttcgatttcgtccccgaaaaattcaactcggacgcagtgctcatcccttgaagccggaaagatctcgacgacatcgccgcgcaccctgaatgttccgcgctgaaaatcgatgtcattccgcgcatattggatgtcaacgagctttctgagcagctcattccgctcgatttccatttccgttctgagcgagagcaccatttccctgtattcctcaggagaacccaagccgtaaatacaagagacactcgccacaatgatgacatctttgcgttcaaaaagagcagacgtggcagagtgccttaatttatcaatctcatcgttaatgctggcatctttttcgataaatgtatcagtctggggcacgtaggcctcaggctggtaatagtcataatagctgacaaaatattcgactgcgttgttggggaaaaattctttaaactcgctgtaaagctgcccggctaacgttttgttgtgggcgatgacgagagtcggtttgttgacctctttaatcacgttcgacatcgtaaacgtctttccagtaccggttgcccccaaaagcgtctgatgctttctgccttcattgattcctttgacaagctgatcaatcgctttcggctgatccccctggggctgataattcgagactaattcaaagcggtctttcacataaaagcctccgtttctttacgaaatcttcctgtttattattttaacacacccgaagcaaaaatacgaactaaagttcggtttttgtgttttcccacaaaagccggcgatttctgatctatcaaaaaacccctcctttttgtcatcaaaagcagggcttcacggcaatcaatcttacggtttctatgagtcttccttcttttcgcccgccttttttgccgcatagagcgaaccggcgacgagcgaggcgatatcaagtcctacaataaaaaaggtttccgtataaccttttaaatatgaagcgaacaacagcgctgcagtgagcgcaattccgacgtaatggttataggtcacccttgtaaaaaacaagacaagaataaaaggaaatatcagtgcaaaaacggcttttgtaaacacaaaaaccctcctcacgtttcttgatcttattcgattatattaaagaacaaagaaacggacaaacatggacactcattcattttgtccatcatcttgccgcgttattcggaatcggacgttaaaaggcgaaaaagaacgatattccggcggccaggaggtttggcatggcgaaaatggcgagcgcgtttgccagcttgctgttccactccccgtgctctttcgtttctgcatcgtgatttcccctgaaccggtcaccgctgacaaatacgcccgaacataaagcagacaacagaatcgcgcctaggccggctgctcccgaaactttgaaaatcagcgtccaatccccggccgcagccgaaaccaatacagctattaaacaaacgaaagcacctgcgagaaaagcccttttcatcaatcattctccttcaatgagttctatccatcatcctagcggaacgttttgtaaaagacaaccaaaaagtttcgaaacaaggcaaaagcaaaagcgcctgaaagcggcgcttttttaacatcggttattctgtttctgctgaggctgctgcctcggcatgcttcatcaccgcatcctcttcttttacaaagatgatgccgagctcatgatgctccccttcataagaagctctttgttcaaaacgaatctcattgtttaaaccgacgacttcaagcttgaagaaagccctgttcttttggagcgcttcgtagaagtccgccgcatttttcacttcaatcccgttgaccttcgtgatgatttcgccgatcttgagaccgagatcggctgccggcgtgttcggaataatcccgagcaccatcaagccctggtctctctttgaaaaatggaaaggggcggaattgtcgttcatccgctgcttccaggataaaaaggcccttcctgcgatcgctgctccggcggcaagggcggcaagcggagtccaccatatgcttccggccgcgatcagcagaatgatgatgccaagcacgctgatgcgcttcgctgtaattttaatgctttcaatcggaagcgatccttgaaccctttggccgaagccgatgaaatacggaatccacaagagctcaaagccgccgttaaatgacaaaacaggccaccacggaacagatgattcgatcgcatgtcccggaataagaataaacaacggcagaagccaggttctgcccgcaatctgctgtccgatcgggagaccccttgtgctcatgacaatcgcaggggacgttttgatatgtgccgttttatagacaagcactccttccgccaccaacagaagtccgagcaagacggcagcagccgaccaattcgcgagggacagctgcggcagaaacgcgtcaagcgctccgaaaccggtgtattcaatacataaaccaacgacgatgctcacgccaagcgtatatgccgctgacagcagactctgtctgaaagttaaagctgcggcaacgctgaccgccgctattaaaaccagcatgcccatcgggagatacagccccaagccgaacgaaacaatggacagtacaagtcctgccagaagtcccttggaatatgtaaatttgaactcgtcataaatatcttcaatacgcgtatggaacgtctttctttcacgtttgatccgggcatagccgtaagcaagactcataatcatcataaaatagaagagcgggtgcaaaaagaacaatcctgctccttttaaaagttcaattaagctttcttcaactgacaagggaacgttcaccgcctcagccaagcatttcaggccgccttcaacacggcagctttttaacgttggatattttaaggaaacccagcttgtctaaagcgtcggcacgaggaaatgacgggcggccgttcaggcgggatgcctgagccgtcagccgcagaaactttcgtcatgatgcttaaacgccggtgcttttcatgcgcattcgtgacgacaaatgctggcacctttaggcaagctggtgcattttattattattctaacaaataataaaatgcttgggtatggtaaacgtgaggtttatttctcctggctcatccaaagcgtcacattcgacaaagaaaaatctttcaggtaatgattgacctcgacatcaagaatatctcctatcagctgcattgaccgcttgatgtcggtcagattgatgccgagccgcttgtggttgtccatcaagtagttgaaataaagttccgcgcaatcctcattaatatcttccacactttcgaccgaagtgtagttcacgaggtatctgctgaacagcataagcaatcctactgcctttgtagcggaaaacgtaacgtcttgtgatcgaacttttaactgctccactaattcatagtattttttctctctcacaatacttgcccttttcaatcgtgtacccccatttattatttatatataagaaaagcgcaagcgtcagacgactccaccaacagagacgaagaacgcaaacagcgctaacattctccgcaataaaaatgcacacattataattcttgaaaaagctttggttctattttaaaaagttttcctatgttatacaacttgcaaaagttacatttttactgcatctttacatccttataaagtctcccatatacttatgttatcgggtcaattctattcattatgaatgttttttttatgaaaaagcaaaaattttaggtaaaaagattgagaatttactttctgagaataaaaaaagtgaggacatcccgtgccctcactttttgttaaacagcacttttaatgcggcttgcagctgaagatcgttcttttcatccatctttttctcctcaatccgcaggttcattgtatttgccgttttttggtcaatgatccctgtttgcttcagcttgtttgctgcctgaaacgccatgacggctttttttgtgctttcattgtaatagccgtcttcccggccggggacaaacccgagtcctttcagcaggaactgcgcccgcttaatttcattgttgttcatatccggcttgaggggttctttcagctgtaaaggccccgccgagaaatatgcaggctgcgtgactggaacggtcggctgaatgccctgcttatggatccaatttcctttaggtgtcagccatttgtacagcgtcagcttaatattgctaccgtctcccatcggcaccgcctgctggacggttccctttccaaaggaaggatcgccaaccacgtcgtagccctcggcttcttttaatgcgcctgcaagaatttccgaagccgaagcgctgcccttgtccgtgatcacgctcacagggtatggttttttctcttttaattttgagaagtattgttttttatttccgtttctttcggcgatttgtatatacggatgatcttttgtcacaaaatgttttaaaatgtcttccacgctttgcaagtacccgcccggatttcctcttacatccaaaacgagcccttttattccctttttctcaagctttttcagttcagcagtaaaatcttttgccgtatgttcggaaaaggaagatattgcgatatagccgacaggtttatcctgtactttctttatggaagcaaacaccgtttccagcgggatttcatcgcgcttaatcgtaaatgtcagctggtctttcattccgggtcggtgaactttcagtgtaaccgtcgatccctttttgcctctgatctttaatacggcgtcattcaaatccattccgctcatggaatcgccgtcgatgctgatgatttcatcgttcggctttaatccggctttctctgccggagactgtttaaaaggagaaacgataatgatttttctgtcttccattccgatttctgcaccgattccttcaaaagaggaatcaagggaatctgaaaaccgctttgccgtctgtttatccatatagaccgagtatgggtcattcaatgttgaaagcatgccctgtatggctccttccaacagtttttccctgtcgacctgctccacatattcatttgaaatcaggtcatatgctttctcaattttctccaattcgtttctagcggtgcttttggctgcagcttcttcagccgctgatgcttttgaaacgacatcatgtaacggaatcgggccggcgcctgttaccaagccgcataacaggctgagcgcaatgatgagccgcacaatcttctgattcatcctatacctcctcttctgcctgcactatgttttgttgcttgatgtagtatgcgccaaaaccgcccgtatcatgtaatcgattttccattccacagcaaaaaaagctgccggagtgctggcagctttcgcttatatggtcctcacgcgcttgatgatttcttctgtcacatcatccgtcgtacttgaaccgccgatatcaggcgttaagtagccgctctttagaacgtcttcaatcacgtcaagcaatcttgcaccgagttcttcttccccgaaatgatcgagcatcatttttgccgtccaaatttggccgatcggattggcgattccttttccgatgatgtccggagcagagccgtgcacaggctcaaacatagatggatatttgccgtttacattaatgttggcggccggcgccacacctatgcttcccataatcgccgccccgatatcggtcaaaatatcgccgaataaattgctggcaacaatgacgtcaagcttctctggcctcgttacaaaaaaggccgacagcgcgtcaatgtgctgcgaatctgcggtaatatcggggtagtcttttgccgtgttctcaaagacttcatcccaaaaaggcattgaataaacgattccgttcgactttgttgcgcttgtgacatgctttttccgcttagccgccaactcaaaagcaaagcgcatcgccctctccgccccttttcttgaaaaaacggcattttgaatggcgatttcatcttcatccctgaagattctgcctccgatcgagctgtattccccttcactgttttccctgacgacaagcagatcgaaatcttttgggttggccagcggagacttgattccttgcaaatatttcgcaggtctaatgttgatgacctgttcaaattcgcggcggattttaatgagcagcccccacagggaaatatggtcggggacaagcttgctgtttcctacagccccaagaaagatgctgtcgaactctttcagctgctccaagccgtcatcaggcatcatttccccgtgttccaaataatactcacagctgtatggaaactccgtaaaccgaaatgagagtcccccgtgaacatccgaaaccgctttcaaaactcgttgtgcagcaggtacgacttctttccctaccccgtcaccgggtatgctggcaatgttgaatactttcattggatcatcccctatttcaaattgtcgactgtcgacagttgtcactttcattctataccttgtgttattttctgacaagaataaattttgagaaaaacccagtttgaataacaaaaagccgattcagtccatctccggacgaatcggctttcattttaaagcggtatataattggccggatcaacagcattggatttcgcgttgttccaaaggcctttatgaatttcaaagtgaagatgctgcccgtaggattggcctgtatttcccatcgttccgatcacttgtccctgttcaacacgctggcctgtctgcactttaattgaagacatgtgagcgtagaccgtctgatatgtttgcccgttgatgttatgggtaataaacacaacattgccgtagctggacgagtaatgggcgttatagaccgttccggcggcggccgcataaatcggaacgcctgaaccgcgcttggcgatgtctacgccgaagtgatttccgagcgaacgctttccgaacccggaagtaaatgtgccggaagcagggcggataaagcctgagctgcttggtgccgacggtttagatgaggaagcttccgattggccgcttgaagcctggcggctcgcttcagcttcctgctttttgcgatgcgcctcttcggctttgatcgcttcatcctggcgctttaaaatttctgcttcattttcgagtgaaccaagttcttcatgtgcatgatctttatcttgcttcacttttttcatgacatttgctttctctttttgctgtttgtcgagcgtcttttttaaatcttccaggtctttgagcgctttttcaaggctttcaaggtccttgctcagcttagtttccttttcctcgacaagctgaagatcgcgtttttgctcttccatcaggtctttatcagcttctacaattgtcgaaaccgcacccgcgcggctgatgaaatccccgaagcttttcgagccgagaagcacatctatgtattgaacagaaccgccgttttcctgcattgagcgaacacggtctttcaatattttattgcgtttctcaatcttttctttaagcttttttatttgctttttcagctcttcgatgcttttctttgttttatcgatttcttcatttttcttttccagcttttcattcgtgtccgtcatcttacggtcgattttctcgatctcgcttctcaggcttgcttcctttgattcaagctctgaaagctcctgtttcgttttttcgagttttgactcgttttcagattttttgctttgaacgtcgctcttttttttctccaagtcttcataagctaaagcatggttgctttttaaggggatcagcactgccgacgatccgagcacagcggtcagccccagcgtcataagctttcttttcaaccttggttcctccttgccttcagaatcaagggagcccggcgctttgcaggcatcccagctttaaacatgatacaaccggcgaaagcgccggtttaaacttttaagaatttgcgaatcgacatcaagcttccccatacaccgataacggctccgatcagcaccaggatcgctgaaatctggaagacgaacggattgtacggcaagagctgtatgaaagtgccttgaactttcggagcgatccactgaacggcatgatgatacgttccgagcaaaatagcgatcggaatgatagaaccgcatacacccaagagcaaaccttcaatgaaaaatggccagcgaatgaaccagtttgtcgcacctacaagtttcataatctcgatttctttgcgtctcgcaaaaatcgtaattttgatcgtattagaaattaaaaacatcgccgtaaacagcaggccgatgaccaatgcaatcccgatgactttggcgacattgctgattttaaacaagcggtctacctgctcctgtccgtatgtcaccttatagacattggtcagcttctcaagcttcttggcagctttcggtgtgtcttgagggtcttttgtttttacgacaaatgcatcgttcagcgggttttcctgctcgaacatcgcaaagaatttcccgtcttccccaaagctgtctttcaggtttttgagttcttcatctttagatgagtatttgacactgctgatttccggtattttctttatttctttttccaatgtatttttttgatcctggttggccgttaagtcaaccagcactttgacttcgacttcttgttcggcttttaatgtcatattgtatacgttcagcatgatgaccatgaacacgccgaccaagataagtgtaactgttacagcactgatggatgcgaaagtcatccacgcgtttctcccgagagattttaagctctcgcgcaaatgccgtccgagagttctaatcataagaaccatactcccctctagcttcatcacgcacaatgaccccgtcttcgattgcgatgacccgtttcttcatggtgtttacgatttctttgttatgagtcgccataacgactgttgttccgcggttgttgatctcttcgagcgtcttcatgatttcccaagacgtctcagggtcaaggtttcccgtcggctcgtcagcgatcacgacatcagggtcgttgacgattgaccgcgcaattgaaacccgttgctgttctcctccggacagctgatcaggaaattgccttgctttgtgcttcagctggacaagatcaagcacttcaagcactttttttctgatcacctctgggcgctccccgatgacctctaaagcaaatgcaacattttcaaacaccgtcagcttcggcagcagtttaaagtcttggaatacaacgccgattttccttctgataaaaggaatctctttttctttgagctgcgccaaatttttattgtttatgacaatcttccctttggaaggcttttcttcgcggtaaatcattttaatgaaggttgattttcctgctccgctcggtcctacaacataaacaaattccccgggatatatagagatgcttattccgttcagcgccgagaccccgttggaataagtcttatatacatcttttatttcgatcatgtaatcacctaatcttttatgtttatacggtcatactcttcgaaagggcctgtcgttttgtgtcccctgccaatttcacgataaatggtattaattcaagccctttttcaacaacacccattatacgtcaagattagacaaaatgatattacagttttgtttcaatgccgacctaagttataggaaaaacgcaaaatcagccaaaaaatttgtactttgggccttatttaagacaaaagaacccgttaattccgttttcccaataggcaaaaagaccttttcaacaaaaaaagaacctttttcacctgaacgtgaagaaggttcttttcgcctcctgactggcaaggcatgcttactttttctctgaaagccacttcgcgaccgcttcagcttctttttcgtctacaagattgccaggcattccgccgcggccgttgactacaatgtccttaatttcgctttccttatacttgccgccaacttccttcaaactcggagcggaaccgccggccaaatccttaccatggcagcctgtgcagttttgctggtaaatctcttccccgtcggttgcagttgcttgcccgcctgtatttttctctttgctttcgttgttattgccgccgcaggcagccagcacaaaagaaacagccataaacagagtaaacagcttcattttcattttttcaagtcagctcctttaacaagtcaacctttattataacctcgattatgcgcgtttaaaaccctcgccaagcacctctgaagcatccatcgcaatgacaaatgcagactcatcaatgtgttttacgagttgtttcagctttgtgaactcggtctggccgaccacgcacatcaaaataggccgctcatcatctgtatagcctccgaccgctgatattttcgtaatccccctgtcgattttattcagtaccgcatgtcgaacttcctcttcccggttcgtaatgatcatcgccattttggaacggttcaatccgacctggatgacatcgatggttttgcttgatatataaacgccaagcatagcataaagtccctgttcgatgttaaaaacaaacatcgcggacaggacgatcgttccgtcaatcagcgccaaacatttgccttgcgacagcccggtgtacttatgaatgatttgcgcggccagcgcagtgccgcctgtcgagccccttccgagaaagaccatcccgatcccgactccgatgccgacaccgccgaaaatggcggccaagagcggattctctgtcgccggagcaatgtcccgcgtcacgtatacgacaaacgggagaaaaacagacccgacaagcgtcttgatgccgaattttcctccgagtaccagaaccccggcaataaataaaggaatattaaatgcccattgcacataggcggcttcaaagccgaacgattgcaaaatggtgctgatgccgctgactccgccggctgcaatccggttgggaagcaaaaacatattaaatgtcacagcgacgacggctgatccaaacaggatatagccgtagtcacgcagcaccgtaaacaattgatatctcgttttgtccatattcatgtctgtcatcctccgcacgattcattaccaatcgagagtatagcatttagcatactgtaagtaaataacagccaaataacgtattaattgaataaagcggcagagggacaaagcttcttacggcttaagctgcccagattcaggcaattttccccgcaaaaaaggcacatcctcacaatgtggatgcgcctttcttcaatttaggaaagcttggaacgcaaatatgcgtcaatgaaagagtcaatgtctccgtccataaccgcctgcacgttccccatttccgtgttggttcgatgatccttcactagagaatacgggtggaaaacgtatgagcggatctggcttccccagccgatttctttttgttcgccgcgaatttcgtccagctgtgcctgctgctcctcgattctgcgctgatacagcttcgatttcagcattttcatggcacgttcgcggtttttaatttgtgatcgctctgtctgacaagtgacgatgacgcctgtcggcaagtgggtgatcctgacggcggagtctgtcgtattgacgtgctggccgccggcgccgcttgccctgtacgtatcgactttaatatcttccgtacggatctcaatgtcgatttcttcgttgaattcaggcatgacatcacaagacacaaacgacgtgtgcctgcgccctgaagagtcaaacggagaaattctgacgagcctgtgcacgcctttttcggcttttaaataaccgtaggcattgtggcctttaatcaggagagtgacagacttgattcccgcctcatctcctggaaggtaatcaagggtttccaccttgaatccgcggcgctctgcccacctggtgtacattctgagaagcattgaaccccaatcctgtgattcggtgccgccggctcccgggtgaagctcaaggatcgcattgtttttatcataaggctcgcttaacaatagctggagctcaaattcattaaactgctttgttaagcttttcagctcgttgaccagttcattttgcaggtcctggtcaggatcttcttttaaaagatcatgtgtcatttgcagttcttcatgagactcgcttaaacttttgtacgtgttgacatagtcttttaacgcattcgcttcattaatgatcgtctgcgctttctgctgatctccccaaaagtcggggtcagccatctgctcgtctaattcgctgattcttgcttcctttgtttcgaggtcaaagagaccccctgaagtccgctaaccgagtagccatattttcaagttcctgtctgatttctgccaattccattattctttcacctcatcatatatttcagccggttcaaaataaaaagaggcgtgcacctctttttattctgttcttccgcagcagtttttatatttttttccgcttccgcagtagcaaggatcattgcgtccgatatccaccgctttgcggaccggttttttcttcgcttgtttttcctcatcgccttctttcggctgatgggctgtcgtctgtccttgaatgacctcttcgcgctcaaggttgttttcgatttcagccttcatgacgaatttggctacatcatcttcaatcgccgcgatcatgttttcaaacattgcaaagccttccatctgatactcgcggagcgggtttgtctgagcataagcgcgcagatgaattccttgccgcagctgatccatcgcatcgatgtgatccatccatttcgtatccacttcgcggagaacgatgactttctcaaattcgcgcatttgttcagagccgtaccgctcttctttctcatcgtatttcgttttgatgcggtcgtaaatgagctctgtaatctcctcgggctcttttccgaaaatgtcgcttttctccactccaccttcatcaaggaaattcgcatttacaagctccacaaggccgtcaagattccactcttcaggcagatcttccttcggcgtatatgaagcaacagcccgctcgagtgaagctttaatcatattttcgacgatggagcggaggttatcggaatcgatgacctcaaagcgctgtttatagatgacttcgcgctgctggcggagcacgtcatcgtattgcagaagctgcttacgggcatcaaagttgttgccttccacacgcttctgtgaagattcgaccgctcttgaaaccatcttgctctgtatcggcgtcgaatcgtccattccgaagcggtcaagcatcgccatcgtccgctctgcgccgaagcgtttcattaattcatcttccatggacagataaaattgggtgataccagggtccccctgacggcctgaacgtccgcgcagctggttgtcaatccgccttgattcatggcgttccgtaccgatgacggccagtccgccaagctcttttacaccttcgccaagcttgatgtccgttccgcggcccgccatgttggtcgcgatggtgaccgcgcctttttgcccggcatcttcgataatctgagcttcccgctcatggtttttcgcgttcaacacttgatgcgggattcctttatttttaaggagccttgatatcaattcagatgtttcaaccgcaaccgtaccgacaagtaccggctgtccgaccatatagcgctgggcgacatcctctgcaacagctttaaattttccttccatggtccggtaaattaaatccggtcggtcatcgcgggcaatcggcttgttggtcggaatcgtaacaacctgcatgttgtagatgttgcggaattcttcttcttccgtttttgcggtacccgtcattccagccaatttttcatacattcggaaatagttctggaaggtgatcgtcgcgagcgtcatgctctcattttggatctcaaggccttccttcgcttcaatggcctggtgaagtccgtcgctgtagcggcggcctttcatcaaacggcctgtaaaagagtcgacgataacgacctgaccgtcttcgacgacgtagtcgacgtctttatgcatcgccgcatgggctttcagcgcctgggcaatatgatggtttaaggcgacatggcggacgtcaaacaagttttcgatgccaaatgccttttcagcttttgtcatcccctcttcagtcagctgaacgccttttgttttcacatcgtatgtgtagtcctgatccgcttttagcgtgcggacaaacgcattggcctgaacataaagcttggtggatttggccgcttgtccagaaatgatgagcggcgttcttgcttcatcgatcaaaatggagtcgacttcatcgatgaccgcaaaatgaagcgggcgctgaaccatctgctctttataaagcaccatgttgtcgcgcaagtagtcaaagccaagctcattattcgtagaatacgtaatatctgctgcataggcttcacgcttctcgtcttttgacaggctgttcaggtttaggccgaccgtcagcccgagaaactcaaagattttccccatctcttcagcgtcgcggctcgccaggtattcgttgaccgtcacgacgtgaacgcctttccctgacagagcgttcaagtaaacgggcattgtggaagtcagcgttttaccttcccccgttttcatttcggcgatattcccttcatgaagggcgacgccccccatcagctgaaccttaaacggaaacatgcctgtcacgcgccgggaagcttccctgacaacggcaaacgcttcaaccaaaagatcgtcaaccgtttcgcctttttcaaggcgctctttgaactcgatcgtcttttgcttcaaagcttcgtctgaaagcttctctatatctgccttgagcgcatcaatctcgttcgctttcttttcataacggctgagcgtgcgttttgtcggatcaaacactttatttaaaattccaagcatagaataacgctcctctttaatttccttgtttaagcatgagtaaacagtaatttttatatatgcaatatcatatcataccttttgtcatttccaaacaatttaccgcgggggaacggaaaaaatcccctctgcggaagatccgggaggggactcgatatatttattcgttcggctcgatcaaaccgtattttccatcgtttcttcggtagaccacattggtcagattggtttcggcgttcgtgaatacaaagaagctgtgtccaagcatattcatttgtaaaatcgcttcttcattatccatcggctttaaattaaagcgcttttgacggacaacctgcggctgttcatcctcaatgtcttcctgcacggccgttccgatgccgtttccttctgcaaaaacatgcttcgaagaacctttttcgcggaatttccggttaacttttgttttatgcttgcgtatttgacgttccagtttgttcgttgcgagatcgattgcattgtacatatcttcgtggtgaacttccgcacggagagagaggtctgtcattggaattgtcacttccacctttgattcctgatcattgtagaattttaagttgacgtgaacaatcgcatcaacgttattttcaaaataacgctcaagctttccaatcttcttctcgacgtgttctcttaacgctggtgttacctcaatattttctcctctgacgttgaactccatcaaaagaacgcctcctttatattaaggatatgtaaatatatttcgtcttttccctgctgaattcctgcataaacgtaaaaattatgtgaaaaatccgtgaattttgacgaagtttgtctcctgccatctgagcccctttattaaatcttaaatatattcacatgcggataaaataagaacaaaaaataacggcatacacctgcagaatcctgacagatgtatgccattaatggatgacataaggtttcatgcattggtggatcgttttcatccattcccgataaagcggtaaaaagtgatggatcaagtcatgctgaaattcagcagacggataattgtagtagatcaagctgtcaaactcacggaagactctgtcaaaaaaacgaatcgaagatttggcacagcttgtctccaaaatcgacagcaaaacagcgtgcgacgaatccaactgaaaaaaagcatagattaaatcgttaaaaatccgctctccttctgtcttcgccaaatcttgattcgcttctattaaatagcaaaacccctcttcaatcgtaaacaaaagctgataataagtcgttaagagcatgtaatcgtcggtgcttgtcaaagcgatcacctatttgcgcttgtcataatatgtgccgtcaatcgtcatgttggcgtacggattgatataggaatgatgcatggcacgcttctgcttcgcctgaagcagctcctgcttgacagcctgctgcagccttttcagttcggccatgatcaatggctccatatccgtcacctgctgcagctgccgcttttccgtctcagaaagaggcggcttgatctcgcggatcaagccatcgcgttttttaagaaaatcttcaattgcctgaaccagctcatcgctttccggggcgccttttatttgagcgagcatatgttttgtttcgctgtagagcagctcaatcttttccattatgccagtccgcccgatccgaaccggccctgccgttcaatttgaagcgcctgcttccaggcatcgcgtaaatctttgacatacccttcgacttccgccacgatatctttgtcattgttaatgtttgcttcaatcaggcggcggtggatatactcgtacatcgcccccatcgaagcggccaattcgactttccgatcaagggtgatattgagctcctgtataatgttttgagctttgacaaggttcgtatttttcgtttccatatcctcttgttcaatcgcctgtttcgccagcttcataaatttaaggcagccgtcaaatagcataagcgtcaattctccaggagtcgccatgttgattgaattttgctgataagctgcatacggattgtttaaagccattgttgatcctccaaattacaattattgtccaagcaattgcgccaagtatgtcgattgttcattcattttttgaatcgctttttccatcgccgtgaactttgtataatagcgattttcgatttgtgtcaggcggttattcatggacgaaatatcagattcaactgtattcaagtttttcccgattgtaaattgattgtttgccattgctgaatttccggctttatcttcaatctgcttcttcgtatcggtcaaaaccgtctgaaggcgtctcatgatgcctttttcattgtaattttccgtgctgctcgttcccgccataaagaggtttgccacactgtcagggtcttctttaattttcgctttcagcttttcttcgttgatctctaaatgaccgcgctgactgtatacgcttgatgtcgtaattccaaactgagtgagctgcagcgattcgccgttcacagagacattcgaataaaaatctgtcctcatttgattggtggcgccgcttaaaatcgtgtcgccccttaacaatccgcttttcgctttttcttcccacagctcaatttgcttttccgtcatatcttttttctgttcttctgtcagcggcgtatagtcgcggtatttcttttccgtgagcttgccgttgaccatatcgatcagttcgttgtactgtgtgacaaagtctttaatcttttcataaatcccgtcaacatcagtcgctacatcaagcgaaacggggctgtttgtcgtattcttcaactgatatgtcacattattaacggtaaagttgttcgttgtcttctcaatctgcaatccgttgatgacaacttcggcgttttggccggcttggctggctgtcagcttgttgtcggcatcaagcgcaaatccgagctgattggacataaagctcgccgtcgcatcatcagctgcctgtatgctgccccctgcgccggttgcttttgatgtgaaagcgatcgtttctacatattcagaaccgttataaatcttttctttcatagcggttacgcccaaatttgatttgttgactttggaaacgatgtcatccagcgtatccgtgctgctgacgctgatttcaacttttttcgcagtcgtttctccaggtgctgtcacttggaaagttagcgtttgatcgctcccggtataccctgaaaggctggaagatttataggtggccgcagtcgccagcttgttgacttggatcgtgcctgacgccgcattcgtggtgcctgttgccgtaaccgccgactcgtcagagcttgtcacctttttcgcgccgtacgtgctgggacggagcataaggttgatggattcctgcaaatctttaattttcgtattgatttcacgatagctgtcgcgctgccattccaaagtctgtttcttttgagtaagcttatcaagcgggacgcgctccgtcttcattaatttgctgacaatgtcgtctatatccatacctgaagctaatcctgatattctgatcgccatttctttaacactcctgttctatgtagttttatcgacaattaaccccataaattccgccatcgccgcataaaaatcgagccactcctttggcggaatctcgcggacgacttcctctgtccgattgtccacgaccttcacataatactctcccaatttttcgtgaagcacaaactgtaggtgcacctgcgacggctccaaaaggttgtttgcgccttgtacggttttttcaagctgagcaaatgtaaattctgcagcgtccgtctgctgcgggcgttccacagcttcatactgtttattcaacatctgtgttttgtaagcatcaataatgggttctaaagatgacaatctattgatcgacaatttttaccatcccctatgctatgatctaaaacttatatcggctaagggcgaatgagattaaatatctttatggaaaaaaattatgagaaaagacaaagtggtttaattaaaaaaaagaatccctgcaaaggattcttggacaaatgtaaaaaaagaccttggcaaaggccaagatctttttaaaattaacgaagcaactgaagaacgttttgcggctgttggttcgcttgagcaagcatagcttgagaagcttgagaaagaatgttgttctttgtgaactcgctcatttctttagccatgtcaacgtcgcggatacgagactcagcagctgtcaagttttcagaagaagcaccaaggttgttgattgtgtgctctagacggttttgtaccgcaccaagtttagcacgttgtgcagatacttggttgatcgctgaatcaacgattttaagttgagtatcaaaacctacatctgttgcagttgctgcattatcagcaaatttagttacatcgatatctttaactgattggttggttactagagttctgcccgtagtatctgcaggatctttgactcctaatgcatcagtgctcattttttcaatgttaacagaaatttgttgtgttgcgttagctccaatttggaaaactaaagatttttcacctgcagctgggtttgctggatctgctggtgctttgaaagtaccatccaacaattttttaccgttgaattccgtacgttctgagatgccgtcaatttcgtcttttaatgctttgatctcgtcttggatagctgttaaatcctcagtttgttgtgttccagtgtttccagcttgaacaactagttcacgaacacgttgaaggattgagtgagtctcagtcaatgcaccttcagctgtttggataagagagatgccgtcttgagcgttcttagaagccatttcaagaccgcggatttgtcctctcattttttcagagattgcaagacctgctgcgtcatctccggcacggttgatgcgaagaccagaagaaagcttctccatgttcttttggcttgcgccgttgtttgctgacagacggttcagcgtgttaagcgctgcaatgttgtggttgattctcattgtgtatttcctccttgaaatgtgtttgattgcacgtccatgtgcatgtttgaagcattcaggctgtccttcctgctacatattttatatcggaggtgccttgaaattgtttatagcaaaaataaaaaaatcctcactttttttgtgaggataatttcgcaagcaaatcgtttgagatggaagcggcccggctgttttcttcctggatcgccaaatagatttccttgcggtgaatttcgatatgcttcggcgcgtcgatgccgattttcacctgatctccgtcaacggatatgattttcacttcgatatcgtctccgatttgaatcgcttcattgagcttgcgggataagactagcatgcttcccctcctatcggctgctttgtcagataagaagagtcatgcaaaatcacttgcttggcaagcatctttctgcggttcaccactatcggcgccatcaaattggccgttgatttctcgaatggctcttcgatcgttaaaatcgccattacttcaacgtcttcggcagattcgatttcaagaagttcaaccgtcgtttcatcaagatcaaagccataatctttgaaaaagacgaacggactggcgacaatgaatgccagctcttccgactgcaccgactgaaggacgacgaacggcgaatcctcggaaagcggcaggatgacgaacttcttctcccctgtaaatccaggcaggccgtttttaaacacgattgtctggtcttcttgaatttgcgtttctccgtgatactttgttttaatgatcatcattcacgatcctttgctgaattacttttgttttgggtattccacatctatttttacctccggatattggagcatgtcaaccttcacactgcccggcgtatagttaacaaccggtttattcggcgttgcttcgatgataggcttgcgcggcgtcgcttcaatgttcactttagccggttcgtatgcgattttcaccctgtcaaatgacggcgtaaaatgaacgccgatttgaatcggttcaggctcgctgttccgcctcgcctggtctgcaagcggattgccttcgatttcgatccgcatcatttcgtctccttcttcagcggtccgtgccattccggcgagccaatcctgatagccctgctgcgccccttcttcaatccttttaaatatatgctttctttctaagtcttcccaagcttttgtctggtcaatcgtgagctttgaaggggtggttgtaatcttcagttcggccggcggctgctcgattttcaagtcagcgcgcggctgttccattttcaaatctggcggcgtcgttgttaaaccgatgcggccggggatattttgcatgatcagcctaggcatctccattatgatatcctccttttgctgaaaaaaagcaactcggatagagttgcttttatcttaaaaagtcaaccagtgtcggctgaacgattttcgcatttacggcaagtgcagctctgtgaaccgattgctgtgtaataaattcagtaatgatctcctcaagctcaacatcttcgttgtctgacaatacctttgtcgccgtctcttcctgttcgctcagccgcgcattgatcaattcgagccggttgtagcgcgctccgatatcagaccgctcattgctcatctgattggagaactggtcaatgtctgaaagggcgttttccattccttccattgttcccgcttttaaggcattttcgagagactcaatcatttcaaagacgttttgtccgctgcttgattgtccgccgaaagccgaaatcggatttgagtttacatttaaggttgcgtttggcgaaacattgatgagaacgtcagagctgcttgtatagttttcaaaattgtatgtgtaagtaccatcggcgttttttgtgatcggagcgacgtcagagttcgttccgttaaaaaggtagcggccgttgacctgcgtattggcgatctgaatcagctggtctttcagttggccgatttcgaccccgatcgcatttaattcatccttgccgtttgtactgttttgagccttaacggtcagctccctgattttcgccatgatatcaatgccttctgtaatgttcgtttccgtgttttcaagccatgtaaaagcttgcgaggcattgctttgatattgtttaacctgggacagctgtgtattgtacttcaggcttttcatcgcgacgacgggatcgtcggatgcctttgtgatcttttttcccgaagaaatctgggattgaagcttatccagttttccatagcttgaattgatgtagcgcaaagaattttttgcaatcatcccttgggttacccgcatgaatctctacctaccttcccacgacacccatgccgttaataatcttatcgaggacttcgtcctgcagcgtaatcattctcgcagccgcgttataagcatgctggaattggatcatgttcgacatttcttcgtctaatgatacggcgctaacagactgtctgttcaattcagcagtgtttacaagcgtttctgtatttttggccagtctgtttgtttcctgagcttttacgcccatttcaccgatgatgcctgcgtaatagtctaaaacggtcgtcgttttgtcaccgatttgaattttcttggtgaagacattagcgagatttgtcgcgttggcgttgtcgctcgcttcaccattcagcgatgcggcgactttatcgccttttgaattcatgatctcatcggctactttgattttgccggcggctccctttgcaggctcagcctctcctccggtaaattcaaagaaaatgcctcccggttctcccgatgaagtaaacccgctttgatggactgcattaaactctttcgcaaaagcaagcgccatcgtatccagatctgcgagcatttcgggatacaaacctttttcttcaccgtttgacatatatccgtaagattcgattaaaccgagcagggaccctttgctagtaaacgaatcgatgccgatgtccgtcccgccgagggaaacgcccgtcacaaggcctgtatcgttgtcgtaattcactttgacagtttcagtcgtgaagtttggcccgtcaagaaccttgcccagagactggccgtttacgtcaaggacttctattgacacaatgccttcagcggttgcgagtggattgccgccggttttcgcatagctgactttgatattaaccattgaagacagttcatcaaggagctgatcacgcttatcgtacaaatcgttcgggagatagccgttcggctcgactttggcgatttgctcgttcaagctgttcagctgggacaaaagcgagttaatcgtcatcacattttgatcaatctggtcgcctaaatttgattgaacggttgtcagcgattcatacagagtgttaaatgtatcggcgaccgcctgccctttttgcgcaacaacagaagcagcgctcggttcgtgggcgttgttcgtcaattcctgaatggaattccagaatgaattcagaactttgtttagtccggtgtcgttcagttcattcataatcccttccatttggttaaaagcgtccacttttgcattgtaatagccggcctttgtattctgcgtcctgtattgatagtccagaaagctgtccctaaccctttcaaccgaaccgatttcaacgcctgtacccatctggcctgcaagtccgacagagtctcttgatacggacggataaggggttgatgctttaaatgtaacacgctgtcttgaatacccttcggtattggcgttggatatattgtttgctgtcacgctcagagctgattgctgcgcggacaagcctctttttgcgatttccagccctaaaaaagttggatttgtcatctttttcactccgttctaagcttttgaatcgaataaagaaagccgtttcaccccgcctgtctggtttggctgctgctcttttccgtaattcgaaccgccttcattcggaaggagcatatcaaatgtaagcgagataaattgaagcgactgaaaagtcagctgcttgttcaaatcgttcacatccttcaaacgggtgacgagctgtgagagcttggcatacagctgttccagcacctttttctcgccgcccgcagctttgctgatacatgcgctgatcgtcgcgtccgagctgccgatacagcttttagttgcttcaatgcgggactgctccgtttgttcaatggcctgcacatacttttgttctttcgtcacgatttctgaaagtgcctttatttcgttcgtcttcagcgcctccgttttttgttccgacagagacagcagatgttcatgcagcacgcataagcgctccagctcttcaatcacccgtttcactgaactgacttcctccttttattgctgtttataaaaattgaccattttttcagctatgcctttgccgtcaactttgtacgttccattctccacggctgctttcagctgggcaattttctcctgacgctccttcattaaatcagggcctttttgcagctcctttgctttcgcggaaatctcaactttgtcttccggctgggctgctccctgtgaagaagctgtttgtttttcaaatgatttatgataaggattaacaggttgtgttccatattggttgatcttcatgggattcctctcactttccgccatagttatctatgatcatactcattttatcgtctgagcttcaagttagtttagggaatcagtcatttttgggcttaaaggtatagtacgtgcctttagaactattatttctctctctttcaagctgctccagctggtctaattgactcatttgcgatgccaaatcctgctcgcatgacatgcaataacgtccttcccgaataagcgtgccgcacctttcgcacggatagccgagattcgggaaattagagatttgaatgcgtttctgtctaataaacttcaatattaactcttcttcgacacctgttttttctacgatctgaaacatcgtggactgccggttttcctgttttttcagaaatttataaacaatttcatacgcgcgctcttcttctttcaagcatgaagcgcaaacggtttgaaaactgcttttcataaacaatgcgttacatcttggacaattcgccaattgactcataaactttgacccctatccttaaattctattttttatatcggcagggaagaaaaatgatttagcttctaattaatgtatatgatgatacagattttgcttctccggatgtcatcaggcaatcagcggcatgatgaagggtcgctcctgtcgtatacaagtcgtcaatcaatatgacatccagattctttactgaccccttttcggttctaaaaacggtttttggcttaattcgctctttcctgctttttttggattgtttttcattttcgattctgatcaagggatgaataacgggtatttgtaataaggaagcaagacgctccgcctgattaaatcccctctccgctttacgttcttcactgagaggtatcggaactaaaacagacgggctgcggcggaagtattgttgaaaagcgctgataaatgaaggggcaaaagcgaagaccagttcagcatcacctctgaacttaaaacgggcaaggacttctttcatgaaagtattgtagagataaacagagcggttttgcctcaaaagagagcgggttaacggattggcctcccattttgcgcagtcaccgcacagctcttcgctcccctgtggccgtccgcacttagggcatacggttcctttgatctcgataaagttctctttacattccctgcatattttctcttctgatcgtaaaaagaaaaaagaatgccatgagagagaatgtaaaagaggcgctgcacaaattaaacaattcagtttattccctccctcttcgattgcttgcgcaaagcgggttttcattcacctttctggcagcttcagccaaggtgacaagcattgatgtattcttttgtttgtcaacgagctctgcttttatgtaagccagcttcgactgatctgttacatattgcggttttactgcatttaaagccaaggcgagcacatcctccctgcacctgctgcacgtacagctcatgtgcagctgatcgatatactgatcaaacaactcttccaaaacagcttctttggcgttgactagcatccggcaccgctcctcattttatattcataggtatactttaccatgaatatcagactagtcaatcaacatttcctttttagacattttattcatgttttgaatatgacgtcgtgccgcattcatcgactttgtcctgccgtaatgaaagaaacagacgtctccatctgtgtgctcgggatgcctgccggctcttcccgccatttggacgagggcgctttcggtaaaaaccgccgactctgcccccaatactccaacctgcgcttttttgacggtcactcctctttccaaaatcgttgttgtcacgagcacctcaagcttactttccctaaaccggttcactttttcatttctgtcagggtcatcggcataaactccttcagcgcgaaatgtttcctttttcagcacactgaccacagatttaagaacagggacagagggaacgaataaaaaaaccggttgctgcagttcttggtgcttaaaaagccattttttgaggcgaaaaggaacttttcttcgtttcaaactctttttccaatttccgcaccaaatcaatgtaggttcaggcaaggggctgcggtggaatctcgcgggaatacggacggtgtccagctttccgctctcagccctttttttcatatctgctgaaggcgtggcagttaaatagatgtgagcgctttgccgttttgccgattttttaacagcgtattgcagcgtgttatcaatagaatacggaaaagcatccacctcatctatgatgatcacgtcaaatgcttctttatagcggagcagctggtgggtagttgaaatgataagcggcgagagattcccaacgtctgagcttcctccgtacaaagcggcaatttccacccctggaaaggcttggcgaaaccgcggagcaagctcgagtacgacatcggttctcggagtagcgatacatactgtcaagccgttgttcagcgcgaattcgatcccttgaaagagaagttctgttttccccgacccgcaaaccgcccagaccaacagttcttcttttcttcgtatagcattgataatggatttggccgctttctcctgacctgctgaaagcgcgcctttccactccgtatgaacaggcgcccatttatggctgacatgcatgtgccaagtcaacagaggcgtacaatcgctcaccctgcccatcatgacgcaggatcggcagtacacgcagcatttactgcaccgatagcaaggataccgggcgaaaaatgagcgttcgtgctggccgcacctcaaacaaataaagcctttcttcgtttttttaataccttcctccgtttttatcaagccttcttggatatgccaatcaacgacggattcacgaaaaggaagttcgcttttcagaaggtggcgctgctccaaacatgaccgcaattcacgggtatagaatgccggttgttcgatgtgaatcacctccaatctgccatttagtatctatcatccatggtttcttgtaaaacagtcaaaatctaaaaatctcccttcaaaacagttgaaaaaaaaatctccgttttgcaaaacggagattggcttttatactgtataccaggcgatacccatcgctccttcaccaaggtgagtgccgatcacaggcccgaaatagcttttataaaattcgacatgtgcatattgcttcgacaattcttcgattatttgatcggcttcttcttcacggttggcatgaatcacaaccgctctcagcggctttcctttctcggcatcttcgccaaaaagctcaaataaacggttcatcgctttttttctcgtccggattttctcgtagggaacgatcagcttgttctcaaaatgcaagatcggctttacttttaaaaggcttccgacaaaagcctgggcgccgctcagacgtcctcccctttgcaaatgtgaaaggtcgtcaaccataaaataagccctcatcgaggttttcatatgatccaagtggcggatgatttcctcaggagccgctcctttttccgccatctcagccgcctcgatcgcataaaaaccctgagccatgcagctgatttccgaatcaaacggatacactttaattccttcaagcataccgcttgctgatacagcgctgttgaatgttccgctgatgccgctggaaaggtggatgctgatgaccgcgtcatatgtttcaccgagtttttcatagagagaaatcaactcgccgtaggcgggctgggaagtcgtcgggagattttcgtgggcttttacttctttgtaatagtccttccagctcatatcgatctcttccctgtatgaagtctctccaaagatcacattgagaggtatcatatgaatattgtagcggtcacgcaggtctttaggtatatatgccgtactgtctgttactactgctgttttcatgaaataaaccttccttatgaaagatactcttttctattctaaaagaaaaagcagcttttttcattataaagtttaattttctgccaaaagaaaagacctgccttatggcaagtccatctttatctcatttctacccagccgtttttaatggctacaacaacagcctgcgttctgtcgtttacattcattttttgaaggatgttgctgacatggtttttaaccgttttttcactgataaataatgattcgccgattccgcggttgctttttccatccgccagcatctgcagtacctcgcattcccttcttgtgagaatgtgaagaggtctccggatttccggatacacctcatgctgagcgtgagatgatacaccgcttgttgcaagacggcggaattcattcacaagattgtgtgtaaccttaggatgcagataagatccgccttcagctactactttcacggcttcgatcagcgtatcggcatccatttctttcagcagatagccccgggctcctgtttttaatgcatgtgtaacatagttttcgtcatcatggatggataaaataataacctttgattccggatacaagtcgaccagttgttttgtcgcttctactccgttcacattcggcatattaatatccatgataacaacatcaggatggtagtgctcgacaatgcgagccgcttcatctccgtcgtctccttcggccactacctcaaaggtaggttcgaaatccaaaatccgtttgacaccttcacggaataactgatgatcgtcaataattacaatatttactttagtcacaagctacgcctccccattctcattgttaaacacaccgcttttatggtcaatatgtcttttgtctctattttacaattatctttacaaagacagtggaactttaatcaatataaatgtcccaagacctattttcgaatcgattgtcattgagccttcgagcaaatcgactctttctttcatacctagcagaccgaaagatttgttcttcttgccttttacttcttttaagtcaaagccgtttccattgtctttgataatcagcgtcacaaaatcttttgtcacttctactttaacatgaatttcagttgattcggagtgttttaaggcgtttgtcaccgcttcctgtgcaagccggaatagtgcaacctcaaaccgcggtgctattcttctttcttcggattctccgatgcattggaaatgaatctttgcttttccatgataatcttcgatcgtgttcaagtattttctgagcgtcggtatcaatcccaaatcgtctaaagccatcggccttaaatcataaatgattcttctgacttcataaagagcatttctgacgttttgccggaggtttttaatttcctgaaagccttcttctgttcctttgtctctgaagatgcgttcgatcagttcagatctcatcataacgttggccagcatttgcgcaggaccgtcgtgaatttcccttgagaccctttttctttcttcctcctgggcttcgataatccgcagtccgaaatcctgcttggcctgcgcatcttcaaggagaacgccgacctggcgcagatcctgatttaagtagtttaagacgacggtaatctgactgacaagcccttctgaacgctcgatgatttcctgaagccccaaaaggcgccgttccagatcatcacgcttctctctcagctgcttttcccgctgctggatcattgtcagttcaacctgcagtttgtgggctttttcataagcttcgcgaatctcttcttcactgaatttatgaaagtttctgctgacctctgacaagcggttccgcgcatggcgggcatgcacttccagcctgtctccaagatcgatgacttcgttgacctgctgtttaatctgtttcagctcttctaccaagccttcgtattgctggcgggactgctctccgatttgaaagacttcatccttgctcccgtcaaccgtttttaacatcttcataatgattgaatctaaaactttggagtccattttggaaacgctcacccattttccctccgtaacagcattgtcatttagttttatcataaatttcattgaactgaaattcgtgtcgaattataatgaaagaatgcgtattctggtttttttatggttaccgatccatttctatttaatcataacaaaatacgcgccaaaattctaagtctgttcgatttttaggagaacagccgcaggcttgtcaggaggtaagcaggcatgctgcaaagctatctgactgttgcaggtgaagggacccatgaaatcgtgattgaaaaatcccggtttatatgccacttgagccgcgtcagtactgaagaagaagcacagaactttatcaaccacataaaaaagcagcattggaatgcgacgcataattgctcggcttacgtcataggagaaaatgatcaaattcaaaaagcgaatgacgacggagaaccgagcgggacagcgggcgtaccgatgcttgaagttttgaagaaacgcaaccttaaagatacatgcgccgttgtgacgagatatttcggcggcattaaactcggcgcaggaggattgataagggcttacggaaaatccgtgtcagaggggctgaaccatgtcggcgttgtcgaacgaaagctgatgcgggtcatgcacaccactgtgaactatacatggatcggcaagcttgaaaacgagcttcgcgagtccccttatcaaataaaagacgttcactatgcagacgatgtcgaatttgaaacgtatgtcaaggaaagcgaaaaacaggcatttacggaatggataaccgaattaacaaatggcaagagtgagaatagagaaggcattcaagtctatttggaagaagcttttaataattaaaggagaatcatcttatggctgagcgtattaaagtgaaagtgcggaaaaaaaagaataaaaagagaaggctgattaaacggtttatagtccttatgctgctcgcacttctcgcagtcggcggagtgggcatatataaaattataaacacgatttccgcggctgacggcacttatgatgagcttgaacgcggagagaagtcgaagctcagggacgatgttgttgatattcaaaaaaagccgttctcgattctttttatgggggttgaagattattcgacaaacggcgagcacggccggacggattccctgattgtcgtgacgctcgatcctaaaaagaagtcgatgaaaatgctgagcattccgcgggacacaagggttcatttggccagcgacacaaccggcacaaaaacaaaaattaatgcggcctatgcaaaaggcggcaaggatgaaacaattgagacggttgaggatttcctcggaatcccgatcgactactatgcaacggtcgattttgacgggtttaaagatgtcatcgatgaaatcggcggaatcgatgtcgatgtgccgtttgactttagcgaaaaaagcgatgtctccaaatcgaagagaatctattttaaaaaaggaaatatgcatctaaatggtgaggaagctcttgcctacgcaaggatgagaaaacaggataagcgtggagacttcgggagaaacgacagacagaagcaaattttaaaagccgctcttgatcaaatctcaaaaccgcaaaacctcgctaaaattgatacaattgcccaaaaagcaagcaaaaacattcagacgaattttagaatcacgcaggcgctggcgcttcaacaaatttacagcggctttgccggcgatgatatcaaaacattaaacatcacaggacaggatcttacgattgcaaatgtttactactttgagcctgaccagcaaaacctggaaaacgtgcaaaatgaattgacccatcatttgtacccggactcagctgccgattcgagcggaacatcgtctgaatcttccgcaaccgctgacggtgcggacagctcagctgaatcgtctgctgcttcttattgatcggctctgttgaatgttaaattcataaatgaataaattgaaggggaactctttatatatttagggttcccctttctttttaagctagcgtaacttactatttgaacaaagcaaatgattgatcatactatgctttaaataattatactgtttttcgctggtatctgagaatgcctcgtctctatttgagggaatatccatatacaggatgtcttctttgaattgagaaaccgttaaatcatatcttttaccattgacaaaattataaaaatgccacccttcaggcagctttgttttctttatttctccacctaatatatcatttacgactagcgcggttacgccgcattgtcccttggcagggttatccttactccattttgaacttgaatctgaagaccaggatttatacaatgctttcactatttgttcgatttgtccaaggtaatgatcatccataaataaccctccttttcataaagttttagttattcagccattattaaaaacccgcttatgatacttccggaaatgcggtaaaaataaaacccctggaaaccaggggttttttgcgttcattaattcctcttcaccatccgcctgtaaaacttcgtaaaaggcttgtactgctcatttacaaggcctgtcacctctgcgattatctgcatgaacagtattaagccgaagatgatgaagatggacacccatagggttgcggtttttaaaagaatggcgctcaggctgaagacgacgccgattaaataaatgacgataacggctttccgatgggacaggccgaaggccatcagcctgtggtgaatatgcgatttatcgggagccgaaatcggctgcttgtttaaaatccgcctgatgatcgcaaatgtcgtgtcaaatatcggcactcctaatataataatcgggatgacgacgctgaacagagtcacgcttttatacagccccagcagcgacagaaccgagatcacatagcccaaaaacagcgagcccgtgtctcccataaaaattttcgccgggtggaagttgtagaacagaaagccgaccgtgcttccgatgactaccagcgacaaagagaagatcaagattttatcggcagaaaacgccatgacggcaatcgtcgagaggccgatgacggatatacccgcagccagtccgtccaatccgtcgattaaattgatggcattggtgatcccgacgatccacaaaatcgtcaacgggtatgcgagccaccccaaatcaaagcgaagatcccaaaacggaatcgataaaaattccattttcaagcctgtactcacgatgatgcaggctactaatacttgtacgataaatttaattctcgcgcttaaattgtatttgtcatctacaatgcctaaaattacgatcataaaagcaccgagtgtaattgctgttattctgttttcataaaggccgccggcaaacgaaccggtcaatactcctataaaaatggctaaaccgcccattctcggcattactttatcatgtatctttcgtttatccggctgatccacgaccccggatttgattgctagacgtttgacaagcggagtaataattaaaacagtaatgagagagacaaaaaacgcaattacagtgcgttcataagacataaggaagtctcctttttaaatgaagtctggtcgtataaaagatcataccttttcattatacaatttcattatttattataacaagctccagccaaaagaaacatcacgaattaatatcccccgccgcaaattatgcatccttattcaagttcaatttatcaagcatcattaaaaatagatgatgccagtctctttcacgtgcgatctttctgcgcagttccacatgggaaacatcatcatgcgcaagctccagctcttcacaaaccgctgtaaattcagcggggtcgtttcctgttaaatgacggtaaacgtgttcctgttcaaccttttccgttgaagggaggttcatacctgcgacaggctttccggcagccaaaaattcaaacagctttaaaggaaataccgcattgttatatggcgacggtttatacggcatgataccgatatccactacattcatataagctggtacttctgacggcgcagcggggcccgtccagatgacattatcttcttcaagaagcgctttaaaatcttcgtctccgtttgtcccgtcaggaccgacaaataaaaatgtccactctttttttgttctggcagcttctttgacgagcttaaaatcgagcttcggcttgattcctccgataaagccgaggacggttccttcccttcccttcaatacatccgctttttgcatattttctgcaaacaagctgtactccacaccgttttcgattgtaaaaaccggctttgtctctccttgaagccggtctgctacattttgttgcaagtattcggaagtgcaaaaaatcgtatcagcagctttgatgattctgccttcagcttcaaaaatgaccttttgcctgaatcctgagacaaggctttggctaccgctgatcggggccgcccacaggtcgctgcagtcatagatgacctgatcccattgataaagcgacgacagcagcggaaagccggggaaggtgtaccataagcacaccttttctccctgaacgtcttctttcagccggtcaagcagcggcttcagcttgctttgatagaaaacatctttgtagcgggcaaacctgaatattttctttttcaaaaaatctttgactgcaaattgcttgattccgttgtcaagcaatgtaaaagtctcacgggaaggattttcagacggacaaacccaaatgacttccttcgtctccttgcggcctgctaaaaactcagcaaggcggtgccttctgtatcttagctgatcctgcccccattcacctgtcgctactatgacgtgtatgaattgatctgctttcactttcaatcaccttttctgtcaatgccgttataatcttttcattactgcgttcttagcgtaatggaaaaagcaccatgtcgctttcatcaagtgaagtcgttcgatttccctgtatacgtaccaggtttttcgcgccgccttccacttgtttctggagatcgatgtttcaacgatgcggtattccgcgaggggttcgttcagtccatatgccttgaacccccgctttaatacggacagccatgtcgccaaatcctggcgggttctaatattcggcatccggatatcacccgtttgttctctgtcaatcatcaccgtcaagcagccgatgatcgtattttttaatacatcatcatatgtaaggcttacgggtgcatgaatggttttatgaagcggttcgccgtcttggctgatcagctcgtatgccgtaaatgagaaagcatgctgatgctttctcatgaaggcgagctgcttatccagcttttctgctttccaaacatcatcgctgtccaaaaaggcgacatagcgcccttcggctttgctgagcgccgcatttcgcgccgctgcagcaccttgattctctttcagaaaaatggcatggatccgctcatcatcttcttcatagcgcttcaaaatgtctcttgtcccatctgttgagcaatcatcggcaatgatcatttcccagtcggaaaacgtctgatttaagacggacttaatggttttttcgataaattcctccgcgttataggaaggcgtaatgacagagattaaaggtttttgcctcgtcatggtcctgatccacatccccaattaaaaatttaacgttctctgaaaacttccggaatgacaatgataaaaaatgacagcgctaaaccgatcagtacgcccagcaccgctcttttcttaggcgacatgccggcagcctggttatcaagcacgatcaacggctcaatttcttcagcagccttcatatcaagcttgcttgtttcaagctcatacaaaaaccgctgtttgtcaactttggaatcagcgctgactgtttcgtcttcaagcgccttaatattcttttcaatgacttcttctctttttgagaacagcgccttatcgcctttcatataggcatctttaatttttcctaaagtatccaatgtttcctgtttatcaggccctgtgtagcttaagttgaaaagtgaatccgttctgatttcaatcgccagatcgtctttcaattgcgccagatcctcttccggcatatccgggaaaatgtcctttaaaaaagcttcgtttttcaacagcagcggcacttgctttgcattgttgtacttcgcttctccatagttcccggttgatatcgttacagtagccgtgtaattagatggagcaacgcttcccttcggcataaaatagccgacaagaccaagaataagaggaagcgcaataatcgccacaataaactttttcactctaccagcaatacgtttgattaaattcatcacatgaatttctccctgtttttaaattcgattttcaaaaatcacctatactgttcggtttcatccgttccgcagactctaaaggtattaaccgtcgcaatcacaagcgcgaggaacacccaatggaaatataaattcgagacggaactcggactgatgcttgacacaaggaaggcgacgagcgcggctgtcaaaccttcaataagaagctttggccgtcttccaagcgatcttttataatatctgtaaagcacggttattaaataaatgtacatcgttaaataaccgagcatcatcaccactccaaaattcgtcatgatctcaacgagccagttatgaacctccacgacccggtccgtatcgaacagtgcatgatgctccaaataatatggcacattgccggcgccgacgccaaatccgtaagtatccagcacataatgcccggcgtttttcaacaaattcgccctggcgacattggatggcagcggctcgctgaaatcgtgtgcggtttgcggagccaaaaagtatgtataaaaagctccggtaatctttcctgcaaacagtgtgacaaaagcgatacatcctgcagctgcggcgatgagcgcccattttttaagcaccttcggcagcaaaatgaacacataaacggcaaggccggctatgacccccaggatgctggctcttgatccagtcaggaaaatcaagtatgccgaacagaacgcaaggagcagccccgctatttttaagtagctgtttttaatgtttttgaaaaaagataaataaaagaaaaagctgatggacagaaatgtcgcaaagtcattctggttgaaaaaaacggatgtcggatagtgctgtttatagtgcggcccgttataaagggtcgagctcggcaggtggtttaacgtaaagtgattgtaaaacccgatgaccattaaaaatacggtcatgacaagccatatgtaataaaacgcgagaatacgatccattttttgaaaaaacatgacaaccagaaaaacaaaaaacattcccattgccaataggaacagatattttatgccatcagtggcagacttgacccatagcagcgaaatcagtccatagcagaaccaaaacgcgaaaaacatcagaatgcctttgacatgcacctgcttccacttttcaaggtgctggctgcctttcaacatttccgctatgaataagaatcctgccagaatcagaagtattcgatatggaaacaggctgaaaaagcccaatttaatcgcaaaaaaagcattgttggcaaaagttgcagcgatgagcagatataatacgggcatcagcaattgctcggacgacaaatacttccggagcacaacgatcacagccagcgcaatcaaaattagacacgccagcaagattttttttgcattggactgggccaatacaacgaatgctaaccctgcggtcaatgcggcgagccaaaccagaacattgaccgcggaacgtttgagactcatttttccccctccttccgcttctttctggaaaagggctgccgacatcagccagcagccagtgatttacgtattcatttcttttttataatatgaaatggtcttttccagtccttcagcaagcggcatttttggttcccagtttaagattttctttgtttcttcattacacagtgtgctgtggcggatatcccccggccgttcatcttgataaatcggagaaagctcagagttcgtcgcttttttcatctctgtaaacagctcattgaccgtgatggaaaagccgtttgaaacatttaaacaaacgtttgattgagcttttagcgcctttacgttggcacaagctacatcaccgacataaataaaatcgcgtgattgttctccgtctccaaaaattaccggagccttgccgctggtcagcaaatcggagaaaatcgatacaacgccgccctctccttttgcatcctggcgcggcccgtacacgttgctgtaccgcaaaatgcaatactcggttccatatagatcataagccagttttaaatagttctccactgtaagcttcgtcagcccgtagggtgagcctgggtttgtttggtgacgggtgtcgacaggcaggtaatccggatttccataaacagccgctgatgatgcaaagacgatctttttcacattgcattcaccagctgctttaatgatatggagcgatcctctgatattgatgttttcatcatttaaaaaattgctgacagactccgctacgcttacttgtgcagctaaatgaacaatataatcgggatcaatgcttttgatgacgtcgatgacttccggcttcgtgatatcctgctcataaaagtcaattgggagaccgtcaatgttggagcggtgtcccgtagttaaattatcaagaattgaaacccggtaattttcttttagaagctgttcagcaatatgcgagccgataaatccgcatccgcctgtcactagtactttttccattgttatccccccgttgtttatacgttggtcaggattccttctccctgtacttccggccgtccgattgaatggtagatcatgccttcgtttctcatttgttcaatttcaaatatatttcttccatcgattaagacggggtttttcaaagcagacttaagtttggcaatatccatgttctgtacttccggccactccgtcaatatgacgcacgcatccgtatcctgaatcgtctcatacagatcttcgctgtaaacggcttgatcgccgagaagcttttctgcttcaggtacagcaatcggatcaaacgctttgactttagcaccgaggcttctcagcatcggaatgacatccagagacggcgccgagcgcatatcgttagtattcggcttgaatgccagcccaagaaccgaaatggtcatgccgtttaaatcgccgaacacatcaaggagcttttgcacaatgtgggcgcgctgcttttgattcgtctcgatgacagcttcaatcaatttaaaaggataaccgactgacttcgcgatttgcaataaagccatcgtgtctttagggaagcaagagccgccaaagccgattccggcttttaaaaatttactgccgattctgctgtcgagtccgacgccttcagacaccttggatacatcagctccgaccctttcgcaaatattcgcgatatcattaatgaacgagatctttgtagccaaaaatgcatttgcagcgtatttaatcatttctgcactttcaaggttagacttgacgattttcgtttgaaatggcttatgaagctcttcaataatggcagcagccttttcgcttgtcgcgccgatgactgctctttccatattcatcgtatcgtaaatagctgttccttcacgaaggaattccggattcgacacgacgtcgaaagggaattccccttttgaattgcgttctataatggcttgtacgagctttcctgttccaacagggacagtgcttttgttgacgatgactttatagccgttcaggtgcttcccgatcatttcggcaacggatttaacaaatgtcagatccgcttcccctgtttccgacatcggtgtaccgactgcaatataaataatctcagcttcttcaatcgcttttggaatatcagtagagaaaaataagcgattttcgtttacgtttttatccacaagttcttttaggccgttttcataaatcggcatcactccggctgagagtcctcttattttttcagcatcaatatcgcagcagacaaccgagtttcccacttcggcaaaacaagttccagacaccagcccgacatatcccgttccaatgacagcgattcttttcaacattatcattcccttctttcagctgacccttcaaatccaatagcttgatttaggtaatgatctttatctctttctattgaaaaaatctgggtttttcgttttcccaatccttatttttattagcttagacgcaaataaatgggtttaaacagtattatattcaacattcatacgcatattaaccgacagaccccaacttaatttttgttcttgacaacatccccatacacatccagcagctttccggcatttttaaaggcgtcataatcctcgtgcaccgtttgatacagctcttcagcgatggcttcttgccaattgccgccttccaaatatcccttgacagcttctgttatgctggaagccgagtgcggcttgatcagaaggtgttcatgctttccgaataaagacggaacccccccgaccgccgcacaaagcaccggaaccttgagagcgagcgcttcaatgacaacagtcggcatcccttcagaatacgaagggagcacaaacagatctgatgcagccagatattctgatatctcatggtttgcgacctgccccgtcaatactgctttttcaccggcgatttgacggatgttctgcttctccggtccgtcgccgatgaatacagctctgtagctgtcatcaagctgcctgaccgcttctgccagctcggctactccctttcccttcaccaagcggccgacgaacgtcagcaactttttgtcttgcggcaggccgagtttctccctcaattcaagtgttgaagcggagggcttttgaaaccggtccaggttgactccaataggaagcaccgagctttcagcaccggtcatttctttcgttttggctttcagcgcttcgctgacagccaatacttttgctgcggaatgcacagctgtttcaaatgctcgaaaagcgcctttgctgtaatggggataaatattgacatcgcttccgtgcaaagtcagaacataaggaaccttcagcttctgtgaaacaacggcagcggcacccccggatggcatcgcgaaatgggcatggataagatccggcgcaagcccgtgcttctcgatcgtcctcaatacagactttgcgatccggcgatgcggctgagcccattttagctgtccaggcaaagccgtatacggcggcctgtaaaccgggatgccttttctttcttcatattccgggactgttcgcacttgacggtatttttttttcagcagcctgagaggagcaggattcacaggcaatggacatatgaccgtcacatcaacgccctgcatctgcagcgcctgaacctgtgtttcatgaaaaacgccttctcccggcctttgactgcttggataaacgctggtaatccaaagaaccttcaatgatgaaccgccctttctgctgtcatcttcctaattgggccctcatagcccgccgataaaatttgccgaccagaaaaccgtaaaaaatcccgctgatcccgacggaaactgccagctgaagcatggcgccgtgaagcagatgtctgctgccgacgctcaagacaagagccagcaatgccatgagcagcgtcaaggccagcggttttccaacggttctgaaatattcgcccagcttcagctggatgacatatttgagcagccatctgccgataaagaaattgaccaggctgatcgctgcatatgtccaggcggtgatcgtcaaatcattcgttaataccgccgcgtaaagagacagcccataaaggagcatgatcccgctgtcccaataaaatgccaggtctgctcgccccttcgccagcaaaaccgatccgttcggattcatcagaaccctgagcagcccgacaatcgcgaggatgttcagaaccggtacggcctgcagccatttttctccgaagacgacttcaacaaataaatctgaaacagtcgtcagtccgatcaggagcgggaatgaaatcagcgcgagaagctttgtcatatttaaaaagccttcgcgcagcgtttggttgtccccttgattctttgagaagacaggaaacgctacccttgttacgatcggattgatttttaatacgggaatcgtaataatctgatacgccaggttatagattcccaatgcttccgcaccgagaaaccgcccgattaaaatcatgtcgatattggcgccaagcctgtttacaagccttgaagcaagctgaaacgcgccgaacgagaaaaattctttcacttcccccaatgcaaagacgaaagaaggacgccatttttttaaatatacagcaaaaaacatgatgcctttaaccgaattaagaaaaacttgtgacaatgcataggccacaatcggatccatcagaaaaaccaaaacgagcaggagcacaaaagacaaaacggtgactcccgcttctattttgctcagcacattaaacttcagatctttttgcagcatatattgatactgctggccgaccggggcgattaaaaacatgacggccaaaatccgcactagaaaaacaagttcgtcccgctgataaaagtctgcgatgaacggactcaggaaaaagaggccgataaacaaaaggatgcccgttaggatattcagccaatacaaggtcgataattggcgttcactgatgttctccttttgaattaaagcggccccgaatcccatatcgagtacaatttgtgtgaaaatcgttacggtggtcagcattccgaccaaaccgaattcggcaattgtcatgatattgccgagcagtgcaaactgtataatttgaatgaccgtgacgatcaaagttgaaacacttgtccattttgcaccgcttaatatttgtttcgtaatggtagacatagcatattcctaacttcctcgtattatctggctccttcgccagtcaatactactttaatcgttttcagcataaccttcaaatcgagaagaaacgttaaattccgaatgtaatacagatcgtgcaccaatttttctctcggactgatatcatagcctccgttcacctgcgcaagtcccgttaaacccggcttaacgattaagcggtttttaaatcccggaatttcgtggtgaaactgagcggtaaacatcggtctttcaggccttggccccacaatgctcatgtctccggccagcacattgatcaactgcggaagttcatcgattcttgttcttcttataaaagacccgactgcagtgatgcgcggatcatccttctgagcccatttcgcaccggatttttctgcgtcaattctcatagaacgcagcttgatcaccttgaaatgcttcccgtcttttccgacgcgttcctgccggtataacggagaacccggtgtttcgatacagattaatatacaaaacagcagaataaacggcagtgtaagagcgagcccaatcaaggaaaggacgatatccattatccgtttcatatataaataacgtactgcttttttagatagagcacaggaataagtttgctggcttgaatattcattgtacattcttaaacttttgtcgatactcactagcatacacctcgattagtatgttactgtttgatctattcgtcagtgtagcatacgaacgtaaacacaatgtaaaggagttattaaaattagtaaattcgttgattttttgttaaaaatgcaccgcctccgttttatctttaatttcaccaaaaatatcatactatataataaagacaaaacaaaggcagcataggcaatttttcgaaaaacgagttttctgtttatattttaatagtaagcaacgattccgtcgtaaatcgctttagcgcctttttctttgtaagtcgagcttttgagttttgtcgcatcgcttacattgctgataaacgcaagttcaacaaggcagcttggcatttttgattccctgatgacatggaagttgccgatctttacaccgcggttttttgtattcaatgcaacatagagacggttttgaatctcggttgccagccgtttgctgttggcagattcatatgttgtataatagtaggtttctgttccggaagcagctggcgttgccgagtttgcatggatgctgacaaacaaatccgcatgatttgactgcgcttttgacacgcgctgtgcgagcgtcaggtaagtgtcgttcgttctcgccataattggcagagcaccgccgtttgatagtttcgtattaattaattttgcaacatcaaggttcacgcttttctcatataaaccgttgccgacggcaccgctgtctgtacctccgtgccctgcatcaatgaagatttttttgccgacgatcggattcttcagctgtgacacgacattggattgaagagaaaccgttccgccaagcacagtaaacgtcgtcatgtttttggaaccgatcacttctcttgtcggtgtcggcaaagatgatgcattcgtgaacatcatcggacggttttgcttagccgccagaacagatcctgttaatccgtcggcatacgcatagccgttgctgatgattgcattcttggcagaagaataatatttcttgacgacattggccgcgacttcatagcggttgctgccgccgatccgcgtcggagaagcaagctgtttgtaaacgctgctggagatgctgacttcaccgcctacgacaatggtcgatgttgttcctttgctcttcatcgcattttttgtcgctgtcggtatggaattcgacgatgttaaaagaatcgggatgccgtttctcgcggcatatgcgccgatcgcaaggctgtcagcataggccgtcccgtttgcgatgacagctttcgaattgctcggcagcttattcgcaatattcgccgcaacctcgtagcgattcgctccgccgatgcgttcgacagatgacacaccaagctttttgatctcgcttacgacaccgttttgaacgctgacggttccgccgattacgatcactttgctaggttttaattgactgattcggtttttagtggccgttggcagtttagacgcttccgttaatagaacaggcgcgttgtttcgataggcaaatggagtcgctgaaaggacgtctgcatatgcctttccatttgcaacaatcacagtgcttgcacttgtccacccctgcttggaaacgttcaccgcaacctcatatcggtttgcaccgtctaatcttgtgacagagttggccgcaaatacattaggcacaaacaaaaagaaccctaacaacaacataggtacagctttaagaaaaaccctcaaaaaaataacctccaaaaatgtaaatgttatgttttcccctgaacatgaacagaggaggcactgctgcctcctgttcaaactctattaatagcttgatagagtcgtatttggatagtagaaacttaaaatcttcttgtaatcgtgcccggcagcagctctggcatttgctccgtactgactcatgccgatgccgtgtccgaatcctttaccgctgagagtaaaagcgttcgtattgctggatacagaagcatacgtgctcttcatattcatgccgcccagcatcgatcttaattgagtcgtcgtcacggaaatcgtcgctgttttttctgaaagttttccgtttgatagaacatagccatttgatttttctttaacaaagtaagaaaacttcacctctgctgttttcggccgctgaccggcagtttttgcgctgctcagggtcaggcttgagattttcgtaatcttaatagattctgcactaggatatttattggtaataaaccagcttttcagtccagacaaataggcggagttcgtttcatttgtcgtattccaccatgtgccagggctgctcaggtttaagccgctggtattgatctgcgtcctattcaaggaaatcgaccagctgttttgcgggtcatatgtatccgctttggcaattaaatatggcacactaccgccccatacctctgcgcttgcttccgtatatcccccgttgcttgacgagtaaacggctgaaatcaaattgccgttatattttaaaacttgtccttttgtggcatttacaacgctggatgtcttcgaattccagtcgtatcctccgtatacttgaaacgcctgcgtatcggccactacttttcctgcggaaccgaccgaataagttctcgccgccaccgcttgggcttttaacgcttccgtctgccagcttgccggcatttcgtgcggcacaacaccttttaaataatcttcgaacggaatgttttcgtttatcggccgaacatatttgcttgattcaatcgtaaacttcatcttgcctaaataaggccttccgttgatgctgatggaatttgacgtcgaatattttttaggtgatgccgtaaacgacgttccaagcgttttgacggctctattatttttatagagcacaagctttccgctcgacacgttaacagagtatccgtctccggtaaacatatctgccaggctatttttcaatgaatccgtgatcgaggtggtccccccaagcaaagcaaaagactgtgttccttttttcgcgactacatctgcaacaggtgtcggcaggctgcccgcttggacaagcagcaaaggatgcttttgtttggcagcaaggacggaaccggccagcgcatccgcaaaagtcgttccattagacatgaaaacctttgatgcgttcatgttaagcgtgttgacaatgttcgctgacacttcgtatctgttcgctccgccgatgcgggtaacagccgcttttttctttaatgtgttttcaacgcctgtgctgacactcaacggaccgccgacgatcgtaaccttgctcggaatattgtaatcgcttcggattgtattattccctgagagcagtatcggataaccgttcattgccgcataaggcgcgatagacagagcgtcggaaaagactaagccggtggcaacaatcgcttggctgtaggaccccatccggctcgcgatgtttttggacacatcatagcggttggcgccgccgatgcggtcaattgccccatactttttcagcgtgttttcaacatttttggaaacgctcgttgttcccccgataattaagatattatcaggcttcatcttggcaatttgagtttcggttttcgccgtcagcgtacccgcatccgttaatagaatcggcgcatcgtacttctttgcaagcggagttgcagaaagcgcgtccgcaaaagcgtcccgattgacaaccacgacagtgctcgggttcgtccatccggcagatgcgacattgtttgccacatcgaagcgggtcgccccgccgtaccgctctgtcgcggcgattcccgagcccgggatttcgtatgcgccggtaatgtcgacatcaacgcttgatttattgcccaaataattgcttaactttaccgaaatggttttgtcggcagcctgggcagattgtgtaaacatcagagctgcggcagttactgacgacagaagcagaagcttcatctttttcaaaacgttatgtacccccttgattcagctctttattttgtttcgatgcttttcagctccaaaacgccattttcaccttttgtatattggacttcgacttttttgccttcttcaatggaattgactttgtcctgaagatcttcatcgacttgaagcgttgtttctttgccgtcaatgttcaccgcaattgtgtggctgtcagccaaccccgcgaatgaaccttctttagtgacggtttcttcagaggccgcatttttattgtctgagcttgacttgtcctccgattggcccgaagtgccgcaggctgacaacaaaagcagcattgataatgttagaactatgagttttttcatcttcttcacctctccctttttatcgacaaattccaacagattctttaattatagcgaaaaattttgcagattgattggtttttttgaaacatttttctaatgatttcgtctatccaaaaggacacatataagtttttgttgttttcgaattgtgagaaacttataatcaaagtagactatataaaaggtgagggctatatgagagctgaaaagagaaagaaaaagaaaaaaattctatataccattatcgctttgcttggaatttttgtcctctgcacaggcagttatgcctattatttatggaataaagcggcatctactgtggcgagtattcatgaaaatattaacaagtcaaaaaaacgcgattcagaagttgatattgataaccatgacccgttttccgtgcttctcatgggtgtcgatgaacgggacggtgataaggggcgcgcagactccctcatttatatgacggtgaatccgaaaacgaaaacgactgaaatggtcagcatcccgcgggatacgtatactgaaattatcggtaaaggcaaattggataaaatcaaccattcatacgcattcggcggtgttcaaatgacggttgacacggttgagaactttctcgacgttccagtcgattattttgttaaagtgaacatggaaagtttcagggatgtcgtagatacgcttggcggcattaccgtgaacagtacgttcgctttcaaatatgacggctattcattcggcaaaggcgagattacgctgaatggaaaagaagcgctcgcttatacgagaatgaggaaagaggacccgaacggcgatttcgggcgccagaacagacagcgtcaggttatcgaaggaatcattaataaaggcgccaatatatcatccattacgaaattcggagatatgttcaaagtaatcgaaaacaacgttaaaacgaatctcacgtttgacgatatgtgggatattcaatccggctataaggaagcccgctcaaaagtcattcagcatgagctgaaaggcgacggcacaaaaatcaacggaatctattattacaaagccgatgaaagttccctgtccgacattaccgccgaattgaaagaaagccttaataaataaaaaaagcttcctgaaaaggaagctttttttattaatctttaaacatgtcaggcctcgcgcttcggtatccgtaccggtaaagaagcgcctccgcaattcgccgcgaagcctgtccgtccccgtacgggtttgaagcccgggacattttgcgatattcatcttgatcggtcaacagctgtttagtcagctgatagatcttatcttcttccgtgcctgccagtttaagcgtcccggcctgaacgccttcagggcgttccgtcgtatcgcgaagcacgaggaccggctttccgagcgacggcgcttcttcctgcacccctcccgagtcggtgaggatgaagtgagcttcagccgcaaagttgtgaaaatcgatgacttcgagcggctctatcagatggactttatccaaatcgccgaaatgctttgcagccgcttcgcgaacagcgggattgagatgaacgggataaacaacctgtacgccgtcaaattcttcgatgatccgcctgatcgctttaaacatgttttccatcggctcccctaaattttcacggcggtgggcggtaagcaaaatcatcttgtcattcccgattttttcaagaacgggatgtgaatagccgtccctcactgttgtgcgaagtgcatcaattgcggtatttcccgtgacgaaaatcgtctccgggtctttattttcgcggagcagattctgttcggcctgctctgtcggcgcaaaatgaagatcggcaatcgatcccgtcagctgcctgttcagctcttcgggaaacggcgagtatttgtttccggttctgagccccgcctctacatggccgacggaaatttggtgataataagcggcaagacctcccgcgaatgtcgttgtcgtatcaccgtgaacaagcacaatgtccggtttgatggactgaaacagctcgtccagcttcacaagcgcattagacgtaatttcagccagcgtttgcctttctttcatgatattcaaatcaaaatcaggctttatgttaaaagcttcaagcacctggtcaagcatttgcctgtgctgggctgtaaccgtcacataagactcaatgtcggggtatttccttaattcaaggacgagcggcgccatcttaatggcttcagggcgcgtgccgaatactgtcatgacttttagtttcttcatttttctatcacctgttttctgtatgaacagcttttttacaaagaaagctttgcctatatttttctcgcaggagccagatttctttttaatacgtttgttatctcatcataaaacatatatttataaaaccgcaaacctaccgatggataatgagaattctctttattatacaacatctttatgctttatacctgtttacacttgtttaagaattgtttttcttatatgatgagtttgtaattgtaattttccggggtatatcatacatatattctgcatactctccgcttgctaaagcgcatttttttctcgctgagtagaaaacatagtttaaggaaggtgtattgaattgaagaaagttcgtaaagccataattcccgcagcaggccttggaacacgtttcctccctgcaacaaaagcgatgcctaaagaaatgcttccaatcgttgataagccaaccatacaatatattattgaagaagctgtcgaagccggcattgaagatattatcatcgtaacaggtaaaagcaaacgagcgattgaagatcatttcgatttctcgccggaactcgaacgaaaccttgaagagaagggtaaaaccgaactgcttgaaaaagtaaaaaaagcgtcaaatctcgctgatatccactatattcgccaaaaggaaccaaaaggactcggtcatgccgtttggtgcgcccgaaactttatcggggacgagccgttcgcagtgctccttggagacgatattgttcaagcagaaaaacctggtcttcgccagctgatggacgagtacgaaaaaactctctcatccgttatcggtgttcagcaagtccctgaagatcaaacacaccgctatgggatcattgatcctctgacaaacgaaggacgtctataccaggtcaaaaactttgttgaaaaaccaaaaccgggcacggcaccgtctaaccttgcgattttgggacggtatgtctttactcctgaaattttcatgtatttagataaacagcaagtcggcgcgggcggagaaatccagctgacagatgcgattcagaagttaaacgaaatccagcgcgtattcgcttatgactttgaaggcaaacgctatgacgtcggagaaaaactcggctttatccagacaactctcgaatttgccatgcaggacagcgaactgaaggattctctaattccatttatccaagaccttttagcaaaggaagaaatataaaattccaaaataaaactggcagggattggatcgctgccagtttttttattagtgtacagaagcaacactcagactatgctcattattatcgataataaacagttgagtttttgtcctaattatataccggttcttgctcttatctaaaattacttgatcatcttttagcattaaagacttgggagaaactttctgaatatcgtgaaatataactgtagttgccttttgattttctaaaacataacttacattttcatacctaagataatagccgttccttccatcctcaaagttttttttcgttaccccttttaaaccttcctttaatactgtctcgtctttccctagaaaagagagtaaatactcataagaagcttgagcattttcattgaaatacggcttaaaagcgtttactaataggttagcttttgatttttcattccccagagtaacaccatttttagtaacaaagtaatttttttgattgaaattgatttttgcaacttttttattttgagaaataagggtcacttttgttccaaattttaaagaaaccttagttttgtgtttcgcttctttatcactatatgtttgaaggtcttcagttaacacatatccagtttgatttaccttcgtaaaacggcttgttttttgctcttgatgttgttctgttttctttgcttcatttcccggaatagcgccaaaagaagcaattgttcgcaaaggagtgctgataaacatcgttgctgctattgcaacaagcaatacagacagtatagatatctgtatagcattagcaacagtttctgacttcttctcctttttagaaaaacgagttgttttctcctctttttgtttaagcattctttctttgacatgttcaatttggtattttttcttttcctttttagacaacttattgaaccaatcaacaaaagctttatattcttttacaacttttttggtttcaccgaacatgcgcatttcgccatagtgcatccatgcaacacggtcacacattttctcaatttgactaattgaatggcttacaaagaaaattgtttttccacgctctttaaattcattaattctgtcgacacatttttgatagaatgtctggtcaccgacagacagtgcttcatcaattattaaaatgtcaggatcgatgtgagctgatatcgcaaaaccgaggcgcgatttcatcccgcttgaatagcttttaacaggctgattgataaaatccccgatatcagcaaactcgacaattttatcataaagctcatcaatctccttgttggtcagccccatcatcaaacatttaagccggatgttgtccttcccgctcaactggttgttcaatccagccgaaattgcaatcagggagggctgtccattcatctcgatttcacctgtagtcggaggaataactttggcaagcaaattcgacatcgtcgatttaccagaaccgtttatcccgacaaaaccgatggtttccccctcataaacatcaaaagagacatttcgcacagcaaaaaaccctttatcacttttattaggcaggaacagcgcttttaccttatcagattgtttctcataaagctgatactgttttgaaacatttcgaaacgaaacttttagtttcatcgtatattctccttactttattaaagaaaatcaacaaacttgtccctgaatttcatatgcaagatggaccccaccgtcaacagcagtaatgtgaatacccagaaatacaaagtatattttacatcttggaaaaaccaatcaccatttaaaaagctgtttctaaaaccatcaataatatagtaaagcggatttaatttaataattgttaccacatacggcttgtttgccaaactgtgtgccacatcccaaaagatcggcaggagaaaaaacaaaagtcttgtccctgcttgaagcaaaaactgataatcccttactaatacactgattgttgaattcaacagactgaatgaaaacataaatgcaatcatacagaacagatagtaaaaatattgcagccaatgcaacgtgggaaaaaatccactacccatcagaatcaggacatagatcaacgtcatcccaaagtaactgaataaatttgaagcaattacaaccgccggcagtgagctgaccggaaaattcattttagacactaaattaattcttttatatacactgtttgatccatcaagtatcgttgggctaataaaaaaccaaggaatgatgcccgcaagcatccaaataataaacggatagtgttcgacatctgctctagcgcctctaattcctgctccaaaaacaaaccaataggctaaaatttggatcagcgggtttagaaactgccaaacaacacccaaatagttcatttgatacgttgactttgtttcataaaccgcaagccgcataatgagcggaagcgaagaaaatacctctttcaaaacttttatcattgcattcattggttatcttccttaaactaatttgatttggggtttttttgctaaagaaatttaaagtaccgcagtttattgtaacagatgttgaaaattttttcacatcaaaacaaagttaagaaccttcatttagcattttggaaccaactctccgcgatccaaatacgaaaaaggctaagttaccccttagccttttctttaagtatgcctgaaaaacgttaatttgaaatcgtttcaaaaagttttttccagtctttcaataatctctcttcactaaacttctcagttattttagcggcttcaactgacattctttctctcttttcaccgtcatttaatagctcaataattacatccgctagctgatcaatgtttcctctatctacaattttcccatcaacatcatttgaaataacatctctaggaccatacttgaaattgtaggaaactggaacacatccagcagacatactttccattaaggagagacatatcccttcataatcagaagttactaaagagagtgctgattcaaaaaatacgttataaacatcaacagaaaagccttttaacaatacattattctctaaaccgagctccttgattaagttttttaaattttgctcctcagaaccccgcccataaaattctagttttgcatccggtattttatcaacaacttttttaaatgcttttatggcatgatcctgatttttcatcttctcatatcttgccacaaaaaccacagtacgagaatctcgttgagtatctttggcaattacctttggggcatggtgcggtatcgcaaaaaacttgtcacttgcaccaaattgtgaaattatatcattcttttgttcttctgttaaaaacacaactgcactataatcgtgaatatgattaaagaagtcaatttgttcttttcttatcggactgccaatggtatatggtgcagcaaagtgattgctgtggaatgtataaataacctttaagttttgcaacttactttcaatactctgcaactggactcgattaaaaccatattcagatattaagaacatttttttctcttcagttaatacataatttaatagccaataagctaacatctctttttcattattaaacttcgccttgaagctgccgttttcatcaaagtaaataatttggtttgttttgttagtttttgggttttttgaaaaactcaaatagcaatttccttttttgttaaaaagcagaaccctggatggtgtatttgtttgataatccatatactctacttttcttacgtatcccttcgaatcaaaccattcacgtttctccctgataaagttaggcaataagtgatcaataaacaataaatgcccttcttcttccgaataccatttgaattttaaataaagtccatccttatagcatctataaacattcttcttaacctcgtcctgaaccgcaaccgatccatcctgttcaggagaatggacgattccgactctctcatctctctgtgtatcattagcgagttcattatatagataacgaactgtagtgttgggctcgagttgattattatcttctagggaattaatacattcatcatagttaatgtaccattcgtgtattaatatatcatttttaatattactttttgatagaacattacttcttcttaatactgaggttgctaagcctgtaggttttgctggcaaaccgccaaacatgagcatgtaaactttatagtccatggttatccactccaattttaggttccactaatactggtgatgagttctcgatttctctaaaaagttttcgccatttttttccgatgttttttgtagagtatctatctacatttataattgcttgattccccatcttttttcttttttccggattctcaattaaaaagtttagagaatgagcaaattgatcaacatcaccgttatctactaatatgccatcttcattcattctgattatctcagatggccctttaggacagtcaaagcttacgaccggtaccccacactgcatcgcttcaactataaccatgccaaacccttcgaaacgggaactgagagcatagattgaggatttcatcaattcattttgaatattatcagtcggtcccattaagtaaacatgattataaagatcttcttctataatgaggttattcaaattttctttttcctgaccaataccaaagattttcaaattccattccggatgttttgcaacaacttgcttaaaagaatgaattaatagatcaaaccccttttgttcaacaagtcgccctgcagctataaccgttttggattctaatgaagattgcattggatctatatcaggaatagaattcgtaacttttctaattctgagttttgttcctttaaacaacttcacataatcgtgtgtatcatcatctgtaagtgttaataaataatttaaacgagggtagtatttgagaatcgaccgttgcattctgcttgagtaaactgaaaaattcaaatgctcttgtccaactaatataaccccttttggcgcatgtttagctgcaaataaattaaagcttggcctcgttgtaatcaaaattccttcctttattgatttaataaacgtataaagttttatatctgataataaagaaaagaaatgccgagcttcttcgtccggatgaatcattttagattctttatttaaaagataattacccatccttgctttaaaactctttccttttttatcccatgttgtcatatcgtgcagtacagttatttttatacggggatctatataaaagaactctttcttttgcctcttaaatagagaaataatttcgactggctctccttgatcaaccagataatttgctgtattcaagactgttcttacagttccgcccattccaaagacattcataaccaaaaaatattttttcattatctcaccctaaaatatacgatcaattattttttttgatgcaagcccatcatcgaattcacaatacttattataaaaatctttgtacagatttttatacagaaaactaatctgttttatattatttattgacttaaataaatccacttcattagtaacaatcggaccaggagcctctttcctaaaattaaaataaaagcctcttagagcagaagaatatttatttatatcataagcaaaaaatataattggttttccggaattagcaaaatcaaacatgacagaagaataatcggttacaagaatatcagtaattaaataaagatacttaatatcatcatagtttgaaacattataaatcagtccttcatatttgcttatttgagcacgaactgcatcccggtaatgaagccgcactagtagcacatattcttcaccgaacttttcaataaagtggtctaaattaaatttaaattgaaatggttcatgttgttttttattgtggaaatcgtcatctctccaggtcggcgcataaaggataacttttttatttctcggaatccccaactcttcttttacagaatttgcgatcttttctttattggacacataaaaaatatcatttctaggataccctgtttccaatatatctttcttaaaagcaaaagcactcctatacacagatgaagtaaaagtatttggcgaaacagtaaagtcccatctactatttcttctaataagagcaggtgatgtattttctttatatgaaggtgaattcgggctaatatcgtatcctaacttttttagtggtgttccatgccatgtttggatatgaacagtccctttacgctttcgataaaaatcaggaaagttaccattgttaacaaaatattttgctttcgccatgtaataaaaatactttagtgaattaggttttacgataacagtgttactgttttctgttaactttttgtttatattatttaaaacccacacgtacttatattgttggccccgtgttctcactaactcctcataaattgccctaggattgcatgaatagcttttcccatggaaactttgaaacacaatgattttattattaataggaagacttttattaaaaattctataaaccacattataatttttaaataataatctattaataatgttattatttagttttgctctatcttcaaatgaaaatacgcctttttgggcatctatattaagctggagagaaataaatttgttatcatcaatatgaaccttcaatatggctaaatcaaaattaatatctcgtattagatcatttaaaacatcacgatttaagaagctgctaatgaattcgaacgaatattccaaaatggtattggatgttttctccaagttaattgttcccgggacagttattttttctgttttatttggaatccgaaaatagataacggacgaaaattcacctgttaaggtttttgccatttccccatttgaaggatttacattaagaaggccgtttaatataaaagagtctttttcaattctgtaatgttgaatttttttctgagctgccactttacgaattaataaagataaatcattgtttaatgtataataaggcttaacagaaaaaagttcgtttaaactattttccatagtgtattgtggtaattgaacaattttttgtttatgttcgatgtcatccaatacctttgatacacgataactattgtaatttgtttcaatataaatatcccatattcccaggcctagttctgcatccttcaacagattagctaaattgatcttaatgatatttgtctttatcggaattttcaccactgaaaaatctgatctatttctaaaaagtacagatgaaacttcctcacctatcgatttatttaatacttctccattgatggttagattttcatctttaaaatagacttcattcaattcataatgactttctatattcttgatatataattcaaatgtcatttcggttttacgatttaccgagtgaaaagagatggaatgatggttaataaaaatgctatccttcggaagcacacttttgtttttaatgtagagagagcttgtatattcttctcctttatatcttgtttttatatatacagataatttagaggatttaaatagagacaagacatcccgaagattaatctctttttcaaaaaagatttgaccatttgctcttattaaatccaaacttttttctaaaacttgatggtctttagattccaatataaaggaaactccctcgacctcttctaaatccttaatatcaattcccccggctacacctcttattaaaagtgctccattttcattgatatgaatttttttcagcatataaaatggttctagtgatgtcacacgaatagataggtttcctttaaccgtcgaataaagaataatatttcgtccgagttcttttattgacgatgatctcatctccatttttgctgttaaaccatcatatactcgatatttattatccgattcattatttaaaatataggcatcccaaagccctacttgcccaaaaacgcttttatcaatggtgtattgaattgaaatttctgtattggatgctactgcctcatcagggtttattaagatttcttcttgcgtagacctatttttcaataaaaaaagtaaattatagtaatcagaaacatccacagtatcattcattttcacattcaatttaattacttcatcaaaaaatgtaattgaaagcagtgaactcatccgactacctttgggtttccacaactttttaaggagcaaaattttcacctcagaccttagctattaattgaaataattatttgatcacgagtttgctgtagcgaaacagaataagtttgataatcaaattgacatgaagactgattttgataaccaaaaagtttaaccggaaagtctatatgattatcaaatgcattatatgttcgaataaacaaacgccatctcgaatttcgttccatacatcttaaaaactcatcatctaatttaaattggaatataccatctattactttcccaatcagagaatgatatacatttggtttattaagagactttaatataaaaaatgttttatttacaaaataatccaactcactttcgctgcttataattgctccctccaaatttaatgaatcttcagatttgtttatttcagaaagataaacttccgtttcaaagggttggaatataaatgccagagtattatatattgtggaaaatggtttgaatttatataaagttttgttgtcatattgataatcttcattgaaatcttttcgcatcagctttattggatagtctttaacttgtccgttatcctctaaccttaaaaaaagatcatatacctcactaggggacatagctttttttaaaatctctttcaaattggtttgaaagagtaggttgttgtttacttcatctatttctatgtcgtatagatgctcatgtacatattggccgtatttattagactttgaacgttttttaatggagagaatagggttaatgcctttcaagtcgatttctccacagacctcaatttcaaccgtaaacaacttttcagaaaaagttgtgttgactgcattaaccacaatgtcattgtttcgtatcgaaaaagttaaaactttatcctcgctgcatcctacctctaacctgcttaattcattatttttaaatttataactctgaggagacaggtcagtcccgcaatatacaggcgtttgttctcccgtattcgaattaaaaataaacatctcataatcgccttcttcatataaataaagcgattctaaatctattagtatttctccctgcttgttctcatatttctgaagagataagcttttcgtttgatctaattgattgacaattctaaccgtgaattcaggttgattttttaaattcaaattaaaaaagttcatacttatatgctttacatcatcaataaccaatattacttatcccccaatacccgatataaactatttttttcgctaaactaaataattatccaaacgctctccacaaaaaacaacaaaaaatgaagtaacagctatcacttctatatgaagaatttcaatattctaattaaacaaaataatctaaaataaaattaaaaaacaatccaaaaaattctgtggtaatcaaatattcctttactaataccaattcaacatttttttttacagtgtttaataatgtcttatgatatcataaaagaagctgaaagttaagatctttaggaggttgattttcaaaaaaacatgtctaacggtcgagtttttgattcacaagggggttataaactcctatttaaatcaaaagtgcgaaaaacacaccttaaacagcacgaatgatctattgacaacacaaagaaaaaagaaggcgggagctgtttcaaagataaaaataatgccttttggacaaaaaaaatcctgatcttttataacttagtgaccgcatataaaataggcactatgtcattaatcgttcaaccaagacaattcttaaatactattagtccccttatttctctagacattttttcgatctatttccaaagaactgcaccttagacattcaacaaaaatcatctgttaggctacaaagtgttttttccatgctgccagcgaactcagtaaacaccttacaatgatatgacttgctgccgtccaaatgccacatgtaatttaaccgattccacttaggatcgctttatatccttcttcaacaagttttattcgtaaccgaaacgacttctgattatagagaaatatctatctgaacgtcttacggttttcgcggctgagtcattctcttgaaaattgaataaagccaagttctaaatgtttctcaatttcttgaatgatttcttaaagcacagagccaacagattcaagctgtactcaagtcgtctgcaaaaaattaaaagacgatggacaacttcaagctaaaacaaggaaatattaactgccatattacgattgactagctgaaacttgttattttcttttttttgtttagaataaaaagaaggtattagtacaaaagaccaaacagaaacagacttttaaattagccgataaacttttaaggagttgccaacagtgtacaaatcatgcgatcaagataaaaaaactattgtttcctttacaatggtaaagaacgaagctgatattatagaagtatttattagatacaatttaaagtttctcgatcatatgttcatttcaattaatcgtccgaatgatgaaacgagaacaatattacaaaatcttttaaatgaagggttgcctataacactatgggaagacgatgatccgtcatttgaacaaaataaaaagaccactgaagcataccataaaatttccaaggaatttagtttcgatgcaataatttttttagacgccgatgagtttatatatggagatataaccgaactcaaagaaaatatcaaacagggtaatatatatcaaatggataggcttgagtacgcttatttagaagacctttcgtttaacgaaaacgttttagagaagatacagtataggagaaaaaaatatcaatctgcaaagtctctaatttgccatgacaaaacagattatgaaaattacaaaataggaaatggaaaccattacgtttattacaagggaaagaaaaaaataaatgataagttaaacctaaaattggctcatttcccttatagatcaaccaatcaatttattaataaaaatatttttgaattggctctctctaatgtttaacaatcctgccctgttgcatgctgaaaaaaccattggtgtccattggagaaattcttataaatatctgttagatagaaatttaaatctgtcatccaatgatttattctcgtatctttataaaacaagtgataaagaaagctttaaagaggaactgatatttgaacccttaaacacaaaagatattcatttaagatacactacccaaaaaaatgaaaagtcattacaatatatgctagtcaaggatttcgagtcagctttaaataaaatatacgaattgaggagtacacagcttaactctttacctaacaatgcagctcaaccccaatctaccacttatgatagtggctttaactatagcgaagtcaaattattaaacaatgcaaaggtttatgcccaagacacccttccccgaattagaaaaataggaaatgaagtagaactatcgggagctattaaagggatctctaaagggaagtcaggtgaatatattgaattcccaaaagagctggcaccggatcgaaactttcaatacaccaatgtttcttcacatggcagtttagcatactggcaggtacaacccaatggtcggctgaaattattaagagtcacaaatcagaacgctgatgatttatcctggtatccttttcatattcgttggtttgtttgaaattgatcaggaaataaaaattcccctttaaaaacactaacagtgtacttaaaggggaatttttttatatggaaatttgataagcattgtcaatgtgaaagatgaagttatgttgtcctctagatttcaataagttaaggacgcaaaacagacatatatcaacttgcagtcctttaatcttccatgaaatcataattaaacgaccttaacccgaaaggaaaaacggactaaggtcgtgaagaagtgtttttaattgtaatggcattaaattcacaaattaaacaggtattacttaaacttgctcagaacaaacttctttataaaacattttcattgcttgttgattgtaatcttcgtagttaaatctcttgaatcttctattataatttaaatctttatttaatgtactaccctcgtcttccgagttgtctaagacgaacttttccatctcagaaaaaagcccatctaaattatttggagcaagcgttccatacccatcttctaaaatacttctagaacctgcaatgtctgtagcaattatgggtttatttagtacaagcgtttctaacaacaccattggctgtccttcatgattagaagataaaacaaaacaatcagctttattaattaggaagaatggatttttcatttgtccagtgaatataacactgtctgctactcctagtgtttcaactagatcactcaaagtctcctttaaaataccgtcacctataatataaagcttcattttcaaacttttatatttattgatcagttgagagaatgctttaattaacttctcttgatctttttcaggtgatagccttcccatgtttacaaaattgatttcgttatgtttaggaagcctaatccctttcatactaaatattcctggcttttcttccttttggataatatgatcttggccctcatagctctcgatagaaaaaccatgattttctacagaatctataatcttttccacatttaaagagttatgaacgtaaaccatcttattcgcatcaacataatgtgctaaattttcagcatttaaatctctagtatgctttgctacagaaacgattttattaaaacacttatatagagaaaagactatacctaacttacgtttgtgtttatattttccattaatgattttttcagtctcagctagcatatcattatgttggtatatactctttttagaaaaatcccctagagccataaccattgtccagaaaggtacgtatccactaaaatcgattgctatatcgaccttaacattacccaacatacgatttatttctctccgaaaaatcttttcagggtttcttttcgctagttcctcagtgtatccccttctgttcatcaatccatgtaaataccattcttttatggttaagttcatacttcctactcgatatacccgctttgcctttgcatttatcctgcttatattgtaagaagattctttatcatagtttcctttatcaattacaaccacattatacttgtcgtaatctatattgtttaacaagtttatagccgaggatgttataccattattcaggaaaccgccacagtaaatcaaaatggtttttttgtgaggctctttaacatcaaagacacagtcagactgttcttgtttgcctttaaatataatatcaactaccttttgagtagcatctcccactcttttgatgtaaatctcattcatttcttgatatacagactgatattgttcttgtatagactcaatatccttaatacattttgcaagctcatcagttgttttacatattgggccagctagtgtattaacgtccaagtacattcctctttttttcagatactgctctttatcatacataaaatacagaattggtttgttggttgccatataatcaaagaaaatacttgaataatctgttatcaggatatctacaagtgataataactcatttgtatctatacaatctggaatacatttattcattaattgttcatcatgttcaatatatttaaataaaagggtatgcacctttaatacgagctgataatcgtctggaatcttttcattcaattccgaaatatgattgaatagctcttcattaatgttggaaacacttcctacttctcccctccaggtaggtgcatacaagataacctttttattaggatcaagttctataaagttttctaaagtttttctaagttcttctttatctgtattaaaggtcaaatccatcctcggataaccttcctcaataatttccccattataaatacctgctaagtcgtgggaatcaattaatttctccgaagtgaattgatttggagacaagatatagtcgctatgcaaaaagttcctttgaatatttttatgttggccaataggcccctccatatcctttccaagggttttaaggggggttccgtgccacgtattgatatagatttgaccctctttcttttgaaagtaggtaggaaaggtaacgttattgattaaatactttgctttagtcaaatatttaatatattcctcactatgaactttaacaaatcttacatttttcaagcctttatacttttgggcataaggattgtcctgatcatttaaagcccatatatgggtgaaatttttgtattcttcattgtttattaaatgcttaaatattgcaaatggattgtcattcattgcttttccatgataagattcgtagaaaataatattttgatcaattctattcttcttgaaattccttgcgaatttaacagtgcgtttgaattttttattgttggtgtaagttttaaaaggctctaataaaaacttcgcccttcttttagctatttttaatttcttattcattccaagctcctctattttcttacttattttaaaggtgaatttattagcaaatcccatacacaagaaaattaatttttaggtgattaaacttgacttaatcatcttaattttaatacctctcacaaagtttctaaaaaggaaatatcaaggagtaaatcttttccctacagttttatacatgacaaccataatagcataagtttctctaaaagttaagaatctttggcagccactaagagggctacaatacattaacaattataagaaagccattgcaataatacaatggctttgaaatggtcattaatggagatttttattcaaaaattctattcaccactttttcagaagaattgcccgtctccaggtaacaaaacttttcataaaaaggctcaaaaatgtcaggcagacgatagtcagatgtctctgtttccttgattttctcaattacttcctcagtcgttttgaccaacggtcctggtgcttcttgttcaaagtcaaaataaaagccgcgcagcttgtcacgataggtttcaatgtctggaacgaagaaaatcatcggacgcttcaaatttgcgaaatcaaagaatactgaagagtaatctgtaattaacaaatcagataccatataaagttcgcgaatatcttcgtatgatgagaaatcatatgcgaatcctttgtacggcgataggtcaaagttttccgcgactaaatagtgcattcttaaaacgatgacataattatcgccgatctcctctcgcagcttttccaaattcaaatcaaggtcgaatttgtattttccttttttatagaactgatcgtcccgccatgtcggtgcatataaaatgacctttttatcttcgggaatattcatttttctctttatggccttcatcgtttccggacggttgtctgtgtacagaaagtcatttctagggtagccggactcaatcattgttttgttaaattgaaaagcgcgggcaaagatttcagttgaataacgattcggggatattaaatagtcccacttcgatgcttctttagtgaaattttgcttgtacttctcagtgttggtacccggcatgtgcacttcttccatatcgacggcaagccttttcagcggagtcccgtgccatgtctgcacatatgtcgtatgctttggtttcggtatccataaaggaagccggctgtttacaacccaatattccgcccttgccatggcaaacagccacttcagcgtaaatcggttaatataagggacatttttttcttcgaaaatttctgtataactcgggtttacactccatattaagttgtattccggatgatgttcattcatatactcgtaaattgctctcggattgcagctgtactgcttaccggcaaagctttcaaaaatgacggttttctttttaacaggcagtttgccggccagtccaaaagtaaaatagtatgctctcttcaccatgcccgaaatctttttctttactttattcttgcctttgcgaatgactgacatcagccttttgctctttcctttggcaaaataaaccgcacgggttttgatcgtatagtcgttcattcttagacgcataccccgttttcgtttctgcggatagatgtgaaagcgagccggtcctttttttgtgtcaacaattgaaaaactgtctatatcatctataagcctgaatgccctgctttttataacggtttcctcccctgttacagcatcttcacctacgtattctatataaaactgaaagaaagcaggcatcctgttctcttcatacagctttttcagatcgatttcagcctcaaatccaacggcatgatctgaagaatgagctgacaaatcgctgcgctgaacgtcttttaaaggaaaaatgaaaaccctttccttatctttttgactaatttcctttaaaaccagccttctgctttttattatcgaacattcttccgcatcgagcagaaaagtatagcctctgatcattagttttccttcggagcttaacttaatgctgtccggttccgctactgcttttctccgtgaaacatcaagagcgaagtggccttttcgggtcgtatacggcaaataaatgaactgtttgactcgatcctgatgccaatacagctcaatcggttttgaggctgtgtaaatcctctttttacattgatttttttcattattttcatatagcacataaaaatcaatgaccgtttcgtctattatcaggttagaaaggttatttaaagatatctccgctgcttttaactgccctgaatcgcttattttgttacaagttacacgcatctcttttttcgaattgcggttcactgccaaaataccgacatgattaagagagatagaactttcgaacacaaaatagaggcgagcgtcgttaatttttatttctcgcagctgaaattctatcggaattgcactatccataaaatcagtctactcctctttttttattcaaaagcaaagccgttcatacttattatattaaaatgattcgtatacgaaacaaaaagcacttcttattttttttaagaagtactttttgaattttatttaactgagccgacattaaaggttcgcgatttcctctttgatcttcgtcgtggaaatcccttcggttctcggaaggtaaacaacctcgcaatgatccttcaggaagtcgaattttccttcccagtcatcccccatgacaaatacatcgatgtcatggtcgatcacatcttgtaccttttgatcccagtttttttccgggatgacttcgtctacatagcggatcgtttctagaatgagcttgcggtgctcatagctgtgataagcttttttctgcttttgaagattgaattcgtcagtcgaaatcgctacgacgagataatcccccaattgttttgcccgttccaataacttgatatgtccccaatgtaataaatcaaacgttccatatgtgatgactttcttcattgtcatgcgctctcctttctaatcttaaggcgaaaagctatattgatatatcaaaaacactcgataagttacattcattccacaggtctttactgatcattcattatagcacatcgcctatcaaacgttaagtattctttaaggttaatgcaattccaaattttatctaaaaaaatcaaaccttttctgaataagacgtaaaaaatcttaatctaatgtaaagatattgttaagcttttatgaatgatctatgctaaaatatacgttagacctcctgaatttatgggctggtctcttaaacttcgactttcatacattcgtatatacttacacttcttaaaccggaaggaggaaaaaaactatgctgcaaacggaaacggttcatcatcttgcatatgttaacggggatttgcccggatttttgaatcatcttgaaaaatcctttatcgaccgcaatgagggggcatttatcgcaacggtaaaccctgagatcgggtatgcggctgcaaaagacaaggattattttaaaacagtttcatctgctgactttatcctgccggacggaatcggcatcgtcctgacgtcaaggctgatcaacagcagattaaaatcgaggatcgcggggtacgatgtatttatcaaccttctcagcttggctgaccgcaaaaagaaaagggtctttttatacggggccaaacaggaggttattcaagctgttgcagatcggctttcaaccgaatatcccggaattgagctggccggatactcacacggctatgtcaaagacaaaggcgaagttgcgaagcaaatcgcggctgccaagccggacatggtttttgtcgctctcggatatcctcatcaggaaaagtttatttatgaacataagcatctatttcctcaggcgattgcgatcggcatcggcgggagcttcgacgtgttcagcggaaaagtgaaaagggcgccgaaaatgttcatcaagctgaatcttgaatggatgtaccgcctgctgaccaatccgacaaggtggaagcgcatgctgaacatcccgaaatatgtcttctccgttctgaaagaggaaagagttcaaaaacagcggcactactatccggagcagatcaaagagcaatctaaaatcgatttgtagaaaagagtttgggtaacgaatgaatatacgttctttattggttatggtttactcggccggtctcgctttgaccggttttattttcagattggtaaaagcgcgcgacagagctgtattgcttgtttcctttccggataatgcgcgcgcgctgcttgatgagtatgtcagcagcagccggccgtttgaaatggaagtcctctatacaaggcacgccgtttcccttgcagatgaatatccttccgttcgatcgcaagtgatcaacgagaaaaatccgattcatctcataaaagccgtataccgaatgttcaggtgtaaattcgtgttgacggataattattttctgctgacaagtgttttgaataaacgccctcagacgacatgcattcaaatttggcatgcgtccggcgctttgaagaagttcggactcgaagatatcggaaaccgctatcgatccgccggcgatatcaaacggtttaaaaaagtgtatcgttcatttgatcatatcgttgtcggctcggaaaaaatggcggatattttcaagcggtcattcggcttgggagatgaccgttttttgcggacgggtgttccgttaactgatgagtattttcatgccggaagacaaacagcggaccgtccggaccaaaaggttattctgtatgcgccgacatacagggactattgtttgacgtccgttcgtctccctttctctaaggagcagctctccggggaactgcagggagaatttttgctgctggtcaaactgcatccggccgtgcgggaacagattgcttttgaagagcacgaagggctgatcaaagacgtatcagacgttccgttaaaggatttgctgatggaaagcgacatcctgatttccgactactcgtcggtcgcctttgagtacgctttgttaaataaaccgattttgtttttcacgtatgatatggcagagtataatgaaaaacgcggactgatcgatgattttgaagcagtcattcccggcaaagcctgcatggacagcgaaatgctgctgaaagaaatcaaagaaatgtccgatacaaaggaagagatcaagaagtttgcggaagagtggcatcaatattcaacaggtgatgccagcatgcgcctgttgaactttatgagcgagcatatgacggcaaatgaaaaaagaccggccggttcctaatggaacacggccggtctttttatgatgattaccgataaaccggcacatcatagtacagcgtatattgatcgagcaatgtatacagactgtacattctccccacctgcttataagcccatccgacatctgtcgcatattggtgaagggcattcggagaccatctcattttatagagggtgtcctgtttgtaagtcgggtggtgaatgtatttttcaccgatgaatttggctccgcccataatggcggcctcaggtgtgaaccacccttgttcataggcgtattttgcgccgtagtaaagcgggttgctgtcgtaagccccgacgccgtacatattgtaaacctttttgccgttgaacatcgttcctttagccaactcggaagttccgttgcccgtctcaaggagcgagtgtgaaatgaggtacagttcattgatgctgtatgctctcgccgcgtcgatgaacgcttgccctttgcctgtcaaaatccctttattataaaggatttttgcattgacctcggcagcattcaatctggccgtttgcgacagttttaaaaattggaagtatgccgagctgtcttgtgtgaaattttccggattgacatatttctcgacttcatccctgctggcatttcgccaattcattctgatttttgcccagccgttttcctgggagatgatgttgactttatcccctttttgcagctgtccgatgatgttgccgcctgtcacaagggggcttgacctgatattcagcagatcagccgtgacggtttggttcgccgtattgatgtagctcaatgaaacataagccggcgcatccgtttgcgggctgactttcatctgtttatcgatcatctggctgagcgtgattccgtagtcagtcgttgtgatttgcgggccgtttttcactttgacgacattcaccggccagccgtaattcgttttgatccgattggcggcagcatccgcacggtctttccctgtaaattgttcattgatcgagatatgaaacaggctgaccgtctttgtttggtaagttgcgctgacattgttcttcttaaagacattcaagcccttgtcgagatctgctttgcttgtgattcgacctgtcgtcacccggtactgcctgtagccgtactcacccgtttgttcaatcttgcccggtatattccgcttgctgaaaaatccgagcgcctgctgtaattgttccgtgccgatcagagcttccgaactcagtttgtagcggctgtaatattggccggtcttcacggcctctgcgtgaatgcctgtttctttaaagaaattgagcgcctgcgtcactttgttctgttcgtatacggattccgttgtcagctgatagtggctgtacactttttttcctgttgatccggccgttcccgccgcaccgtttttcttaaagaattcaagccctttattgattcgcgcttgaacggcggtttcagcagacgcaatccggaagcggctgacggtcgtgctgccggtgctttgcgcagaagcctgaatatttttgtttttaaaaaaccggatgccatcgtttgctttcttttgatctgaaagcgggacggaaacgattctgaaagatgtctgctttttccccgcctttgcagcagtataacgccacgttttctttttgaaaaaggcgtcgatttttttgaggttttgactgtctacgcttttcatgcttacgatccagaagcgtgtaccttttaccttttccgtgcttgaggcgagaccggttttctttttaatttgtccggcggcatttttcgcgctcttttcgtcattaaaatatcccgatttcacattgtatagctgtgccggctgaccggcggcttcatatgcccctttgactttgagctctttttcaaactgcttcagcaggtttttcgcgtttgtttcgccttgtatcgaacttgtcgcaattttatatttaggctgttgtttctttacggtctctatcgttcctttaagggccgtttctttttcaaactggacaagcaggcttttcgctttgctctcatctgcgatttctgcagaataaatcttgacgatcgcttgtcccgctccgtatggtgcatacgacgctttgaggccggtcgctttttgaaaacgatcgaggatggctttcgtgttgtcttcgccttcgattcctccggtggcaaccttcacgtatgcttccctgttccctgcaagtgtataggttgctttcagaccggtttctttttcaaattggagcgcccattccttggctttttcttcaccggcaaattcctttgataccgctttggaaaacggttctttttttccaatcggaccataggacgccttcaaaccggtttctttttcaaactgcaaaagcagattttttgctctgctctccccttcgacaccttctgatgtcaaaacgtatgttgtgccgtttttccctgaaggtttgacctcggctttccatcccgtgtcctttttcagttgttcggctgctttgagcgcttcgctttcgctattaaactcttttgctgtttcaattttgtagacggaagtatcggtatatgctgctaaagcaggaattgccgggactgccgtatgtacgagcaaaatgattgcagcaaaaataacggtttttctaatgtttttcacattctttactcccctcgcctatgagcctcccaatttctaaaacttgctttctctttttatcggcgagccggattatttttttacaataaaaaagcttaacggcctttttttgcagaccgtcaagctttttatatgtgtgacacgattagttcacatgttccttctattgtaaagtcattggtttccgccggcaggataaaatttgtccctttgctgatcggaaataattcgccgccctgagtgagctttccttctccttcaatcacgctgcacaggaggaaaggggcatcctgggtcagctcagcggcaccgtcgatctcccatttatatacggagaaatattcggcttcaacaaatgtcttaatggtaatgcctttttgagtttctgtcgattcgtcaacatagctgtctacatgcggtactgttgtgacattgatcgcctgtgtcaggtgaagttcgcgcttttctccgttttgatcggtccggtcataatcatataccctgtacgtcgtatcggagctctgctgtgtctccaaaacgaccgtcccctcgcaaagagcgtgaatcgtgccgcttggcacataataaaaatcgcccggtttgattttgatccgccttaacaggttgtcccaatcaccgctgttgatcatggtgaccagttcagtccgcgttctcgccgtgtggccgtaaacgatctctgctccttctttgcaatcgatgatataccagcattctgtcttaccgagttccccgttttcgtgctctcctgcataatagtcatccgggtggacttgaacggaaaggtcttgattggcatcaagtattttcgttaacagcgggaaacggtccccctctgcacctccaaacaattcacggtgttcgtcccaaagctcggcaagcgtttttcctttgtaaggacctgaagcaacgatgttcggaccgtttggatgggcggaaatggcccagcattcacctgtcaaatcggagggaatgtcatagccgaatgactcgcgcaaagccgttcccccccagattctctctttaaactcaggctgcagaaatatcggtgattgagtcatgctgccatctcctcccttaattcacgatagtcttatgtaaataaaacgctttcttttattgatagacatgtatgttgaaatataaaccttttcatattcattatgacgttatctcgatagaagtcaatgccggaaaggaaaaacagaagccctcttcaggcttctgcttgtgatgatgcaagctcaataatccgctggtttgagcttcctctgtaaaggagcgtcaagtccctttttttgagttcgaacgggccgtctaccaggacatcgcaataggccagcaaggcgctgtgcttttcattcttcaagatttgttcgtacgtatagccgctgtaaagccagatgtccttttcggaatgctgcttaattttttctgacagctcgatcagttcgcctgcatgcaaaagcggctcccctcctgaataggtgacgtttgtaagcgggtttttcataatttcctcgaatacttcgtctacactcatatcaaatccgttattgatattccagctttgtttattatggcagccttcacacatatgcgggcagcccgctaaaaacacgactgttctcagtccttctccgtctacgatgctgtcatggataatattcatcactttcatagatgcttcactctgtccttttcttcttgtcttttcgccgaattccactttgacatatctccgactaaatatcctgtaatccgtctgattcgttcgatcaaagcctcatcccggtttttgcactgcgggcattcattatctatgattccggtaaatccgcacgccttgcagtggtcgacaggatggttgatcgaggcgtagcccatgcctgaccggcgcatggcggtcacaagcatgtccatcgctttaatgttttttttcgggtctccgtccagctcgatgtagctgatgtgccctccattgcacattaagtggaacggcgcttcttttctgatcttttcgaccgcagtcagcttatagtgaacagggatgtgaaacgaattcgtatagtacacccggtctgtgacattgcggatcgaaccgaactccactttgtcttttttgacaaatttccctgaaagcccttctgccggcgtagcgatcaaggaaaagttcaatttgtgtttttctgtggcttcatcggccttatctctcatcgactggacgatttttttgccgagttcaaacgactcctcgctttctccgtgatgttttccggtcaatgcagtcaaagcttcagccagcccgataaatccgatgctcaatgttccgtgctttagcacatcctcgagcgtgtcctcaggttcaagcttctcgctttcatgccagatgccttgtgaatacaggaatttaaagtcctttgctcttttcttgcattgaaaggcgtaccgttcaagcagctgttgaatcgttaaatccatgtagcggtttaacaaggcaaaaaactgttcaacgttttcgctgagcagcgctattttcacaatgttgatcgaggtgaatgacaaattccctctgccgacgctgttttcttttccatgaatattggacatgacgcgcgttctgcatcccatataagcgatttcgctttccggcgttccgtcataaaaaggtttgttcacgggcgagtcgataaagctgaagttcggaaacagcctttcagcgctcgtttccaatgcaagccggtacaagtcatagttagggtctgtttgatcaacgttcacgccttctttcattttgaagatctgaatcggaaaaatcggcgtctcacctttgccgaggcctgcttttgtcgccttaagaatatttttgatcaaaaggcggccttcccttgacgtatccgtgccgtaattaatggaaacaaacggcacctggccgccgcccctcgaatgcatgctgttggcgttatgtataaatgcttcgcacgcttggtaagttgtgttgtccgtttcttcccacgctctttcccttatctcttcttctgtcaaagttgtcgggtattgtttgattttcgcaagatgcttttcgtacgttttgcggacgtaaggcgccaggtcgtaatcgaacattgggaatgactggccgccatgctgcatattttgattcgattgaaaaatgatagatgcgagtgacaatgcgctcataatgtccttcggttccctgagggagccgtggccagtgtggaatccctcctttaacagccggaccaatggtatctgacagcaagtcgttgtcccgctcggcatatagtctaaatcgtgagggtatataaagttgtcatcgactgctttcttgatttccggcgacattaagtaatggagcgcataatgtctggaactctcggatgcaaaccggctcatttgccccatcggggagcggccgtctacgttggcattttcctgcataatatcgtgatttccatacccgacgatatcatgaaatgtttctgtcaattgcaataatccctgttctttaaagcctgttgtcatcctaatctctcctaaaaagtagcatatatagtgtttgttcatccaacagacactatatattgatattagcacagattatgttcgtcaaatttagcaatttggtgacgtttcaaaaacggtcataaaaaaacgccccggacaaatgtcccggtgcgcctgcggcaacattacttgtaatcaatcgtcatttgtttcggagattttctttgtttcgtccgtttttcgatccagacggttgcaagcggcgtcagaagcgaggtgacaatgacgcttgtcgcgatgatcgcggttgctgaatcagctaccggcgcaaacacggggtttgcatcggcaagtgcatacgggacggctaccgcagccccggccgttgatgacgccgctactcccgcgacaccgtctcctcttgcgacaaagcggtccagcaagtatagagatgcacccgagagaatgacgactgatacgccgacaacaatgcctaaaaggccggattgaatcaacatgttaaaatcaagcgtgtttccaagtgaaaatgcgaagaacggaatgatcgccggtacgacttttccgaacaaatcgcgcaattcagggtcaaggttaccgagaatgcagccgagtaaaaacgggatgacggttgcagccagcgtctcccaaggaaatgccgcaagccctgtcacaccgaaagtgaccatcgtcataaacgggcctgattccgtgctgataaaggcaaaagcaccggcgtcttcctttcttcccatgtgattcattaacgccaaatacagaccgccgttcgtttcattcataacggctacgatcgccagcacggacagtccggcaaaaaacccgctttgaatgccttcgtctggaatgaactgcgctgcgatcaaacccaataatgcggcaaagccgactttgccgatcagaagcgtcagccccttcctcgcaatatatcctgaagaacgaaaatctattgtcgcgccaacgcaaaagataaatactcctaaaatcggcagcgttccggtaatcagggcgcctgtaaatccgccgaaaaactctgcggttcccggtgcaaatgtattcagcgttgcgcccagaaagagcggaatgatcatcatgccgcccggcacacgttcaatcgttgctttaattttcatcatttttttctcccattctagaaattaatgaaaaagcaaagctgtcgatcttgcaaaacctgaagtctttaccacgctgcgcacgctttatttctgctgagcccgccgctgaaagatgcgctggagatccgcttctgacactttgttcagctggcttcccacacctactgccaatgctccggcatcaagccacttctccacatcgccgggatggattcctccggttggtatgaaccgaaccttcggaaaaggaccggcgaggttcttcatgtaaggaatcccggatgttccccctggaaacagcttaagaacccgaaaaccctttgagaccgcttccataatttcgcttggcgttaatacgccgggaataaaaaatgtatgcaatgatgcggcctcctcagccagtgattccgaaaaacccgggctgacgataaattttgaccccgctgccgcggcttccctcgcctgttcgctttcaaccaccgttcccgctccgacaagaagaccgtcttttcccgcaaatttttcaatcagctcagacgctcccggcgtcgtatatgtgatttcaatcgcagtaatccctttgtcgatcagtctgtgaatggtctcctcagcagcctccttaccgtctgcgcggacgactgcgatcagcccggcctcgcccagctgctcttgcacttttccgatcatagacatttccattacggtcaacctcctattttttggttgtttttctctccagccataaaagctttcaattgatcccttgacggcagaccgtccatatcccccggagccatgacggccagcgctccgatcgcattggccctctgaactgcttcttccagcggaagtccgtctaaaaggccgctgatcatgccgacggcaaaaccgtcgccagcgccaacagtatcaacaaccttctccacctgataacccggcacataaccttctttttccgatgtcctgtaataagccccttcttttccaagcttgatgacaatcaccttgaccccctgcattacataatgtttagcgatatcctcgggagaattgcagcctgtcaggagttttccttcattgatccccggcagaaaccagtctgcctgcgcggcgatttcattaattgtatgaaccattgtctgctgatccggccaaagctggaagcggagattcgggtcaaacgaaatcgtcttcccgtcttttttcatctggtgaacggcgtggcgggcgaagcccctcatttcccttgaaagtgcaggaggtatgcccgtcacatgcatatgtttggcttgcttgaaatactctgccgggtagtcatcaatgctcatcgtgcttgcggctgatccgctccgataatatgtgacatcagggtctccgctttcaacctttgacttgagcagtatgcccgtctgccggtctgcggtgcgtttgacttcagaaatgtcgacgccttcttttttcaattcatttaaaataaaggttccgagcgaatcggcgccgaccttgctcatccagccgacccgaaaacccaggcgcgacagtccgacggcaacgtttgtttccgctccggcaagagctttggaaaacgaagacgcctcatgcagtccgcctgcttcatttgcgtaaaacatagccatcgattctccgaaggtcatcacatcaagcgacatgatttcactctcctttcaaaatggtaccggtttcaaaagcagttgcgggaaaacactctcccctaagttttcgggtccatgagtgtttccgtttgacaagttctacagcgactgtctgagaacaagctccgcctcaagctgaatcgtctgcggggcgctttcgtctccttcaatccgtttgatgatccgctccatggcgaccctgcccatttcatgcgacggctgggcgatggtcgtaatgcccggaccgatcaatttataccattctgtatcatcaaatccggcaattccgacatcttccggaattgaaatgccaagctcataaaggcagctgatgattttcagcatcagaagcccgttgtttccaagaatggcttttttcccttctttcatttccaaaaagcttttgacggactgtaatagagattctttgtctttgacgtcagcctcatatacgagaggggtaccgccggcgtttcgttccagcgcgatttctgtataggcggaggccctttcctcccttggactgattcccttaatcggttcggtaaacagaccgacctgggcatagcctttgtcatacatgagattgacgatttgacttgtcacttcgcggttgttcgttgtgactgcatcgatcttgagcccgggcactttccggtcaacgagcacaatcgatacatcctggctgattaaatccaagagcacatcgttgttccttcccgtcgtattaataatcagcccttcaatgtaatgcgcgttcagcttgtgcagcatctccctttctttctcaggactgttgtccgtgttgcagaccatgatgctgtatccgtactgatcgcaaacctcttccacccctctcaaggtggctactgaaaacgggtttgtaatatcggcgaccaaaaatccgataactttgctttttttcaccttcagcccctgtgccatctggcttgggcggtaattgagctcctcgatcgcttttttgatgcttttcacctttttcggtgaaatggcatcaatcttcccgttgatataacgggaaaccgttgattttgatacgcctgcatgtgcggcgacttcgttgatggttactttcgctgtttgcttatccttcattcaagtactcctataaccttatgatttgaaaccgatttcaaaaactttataccaccagcatatcacatcatttaaaatttggaagagtcttttttaatatttcagcattgtcctttacaatattcagaaaaaagtgaaaagactgttgacgctttccattatttactttaaaattcatgtttgaaaccgttaccaaaaacttttggcacttcattcaagtcagtctaaaaacgtccaattcaaggaggagaaggtatggaaaatcgttattctgttcatccagaacaagcgaaacgattcacaaccgcagagcttcgcgagcattttttaatagagtcattgtttgttgaaaacaaactgaatatgttttattcgcatgaagacagggtcgtgatcggcggagccgttccagtaaaggagtccatagcgctcgatgccggcgattttttaaaaacggactatttcctagaacggcgcgaaatcgggattgtgaatgtcggcaagcccggtgcggttaaagtcggtgatgaagaatacgtactggagcacaaagactttctgtatatcggcctgggaaataaagacgttttcttctcaagcttgaatgaaggcggggccaaattttatttcatctcggcgacggcacaccaaaagtatccggtgcaaaaagcttctctttcagagctcccatacgatcatttaggagaagaagcctcttcaaatgttcgtaatctatacaaagtgattcatgcagacggcattcaaagctgccagctgatgatgggcattacgtttcttgaacctaataacacatggaacacaatgcctgcgcatgtccacgaccggcggatggaggtttacctgtatcttgatcttgctgaggatgcaaaggtgtttcatttcatgggcgaaccgacggagacccggcatcttgtcgtcgggaacgaacaggctgtcatttcacccgcgtggtctgtccactcgggctccggcacatccaactactgctttatatgggcgatggccggagaaaactacacatttaaggacatggatgctgtcccgatgaatgtcattcggtaaggacgtgaacgtgagatgggatatcttgaatcgtatttttcacttgaaggcaaaacggcgcttgtcacaggcccgggaacgggaatcggcaaagggattgccgaagcgctggcaaaagcgggagcggatatcatcggcacttcgcatacgagcggacttgatgaaacaaagcggctgatcgaagaagccggcagaacgtttacttcttatcagcttgatatgggcaaccttgacgaggtcgaggcttttgcaaaagaggtgcctgaccgccatcaaattgatattctcgttaacaacgccgggacgatccgcagagaaaaagcggctgatttttcccgggagaactgggaagcggtgatcaatgtcaatttgaacagcttatttttgctgacgcaggctatcggccggcagatgattgagcgaaagcaagggaaaatcatcaatattgcctctcttctttcatttcaaggaggcattcttgtccctgcatatacggcaagcaaacatgcagtagccggattgacgaagtcttttgccaatgaatgggcggcttataatgtccaggtcaatgcgattgctccgggctatatcgcgacgaacaatacaaagcagatccgcgacgatcaaaaccgcaatgccgaaatcttaaaacggattccggccgagcgctggggtcagccggatgacattgccggcgccgccgtattcctttcgtcgccggcatccgattatgtgaatggacatgtgttagccgtcgatggcggatggctggcaaggtaatgcgaggaaaaggctgccggtagctcggcagcctttatcatcgctatggcttcaaaattactttaatgcaatcatcttcatggtcgttgaacaaatgataagcgcggccggcttcttcaagcggaagctggtgcgtaatgatttccttcggatcaaattgattctcttcgatcttcttgtaaatctccggcatcaaatggatgaccggagcctgccccatttttagcgtaacatttctggaaaagaatgcgccgagcggaaacatattgtaattgcttccatatacccccgtaatctgtacggttccgcactttctgaccgcctttgtagaaatttgaatcggtccgagcgtgccgccctgaagcttcagtttttgctccagatactcaagcggagattttttgccgtccatccctacgcagtcgatcacgacatccgccccgccttttgtaatctcctttaaatgctcgcccatatcaggatattttgtaaagtcaaatacttcaacgcggtttaatgcctcagcctgctttaggcggtagtccaagtagtctactgcaatgacccgcttcgccccttccatccaggcaaacttctgcgccattaatccaaccggcccgcagccgagcacaatgacagtgtccccttttttgacgcctgcgtgaagcacgctccaatacgcggttgggaggacatctgataaaaacagaagcgactcgtcctccatctcgcatgattcaggaatgacaaacggcgtgaaattgccaaacggcacttttaaatattcagcctgtccgccagggtgattcccgaatttttccgagtagccaaaatacccgcctgaatcataatggggattggcattgtcgcactggctttccagcttgttttcgcaataaaagcaatgtccgcaggcaacggtaaacgggatgacaacccggtctccttttttcacttttgttacatcaggtcctgtttcttctacaattcccatcggttcatggccgagctggaagccttttggaagagggaaattcccttgataaagatggagatccgaaccgcaaatcgcggtagaagtaattctgacaacgatatcatcgcttttttcaattttggcatcctccacctggctgacttcaacatgctgaggcccttgaaacgttacggctttcaaatcgtcacactcccattatcgttcagttgactttagtgtgagataaacccgggttcttattcagttttttaaacaaacgtttcattagccgtcatgtagaacggccatgattcatacatagaagaaaacggaggtgttgggatgctgctgcaaatactggtcggaggactggttgttttcattattttttttctcgtgtttcgggcaatcagaacgggcaatctgccgcgccatgacgattcgcagccaggagacggagagaacagagatcagccatgatcggccggcctcttcacacaaaaaaggatggggccttgcccatccttttgcctatcgttcaaccggctgtgtgtcagttgccgtgattccgcggtgcttgtcccgcaaatcctgctcgatctcttccagactttttccttttgtttctgttactttaaagaagacgaacaggaaggccgcgattccaatggccgcatagcacagaaacaggtaactgatgcccatcgcttccatgaggaccggaaaactcaaagtcacaattaagttccctgcatggagcattaaagtcgatactccggttcctatccctctgacatgaagggggaacagctcaggcagcatcacccagacgatcggcccccagctgacggcaaatacgacgatgaacacacctaagcagatgacagtcgtccatgccgcaccagaggtattgccgaaaaagagattagaaaaagaaagcacgatcaaactgatgaccattccggcatttccaaataataaaagcggcttccggccaatcctgtcaatgaagcggatcgccacaagcgtcatcaggacattgaccgttccgatgccgactgtccctaaaatggccgccgaatcttcaaatccgacattcgtaaacgtttttggggcatagtaaataatcgtgttggttccaataaattgctgcagaaatgccagtccgacccctgcgattaacgccgggcgcacccacggttccagcagctctttcaagccccctggtcctgcttttccgcttccttaatttctttgacttcctgatcgacccgctctcctcctctcatctttgacaaaacccgccttgctttctcttcttttccttttgttaagagccagcgcgggctttccggcatgaaaaagataccgattaaaaggccgattgacggaataagggccaatcccagcatccagcgccatgcgcctgcatcactaaatgcatagttgatcaaataagagagcagaatcccgatcgtaatcatcagctgatttaatgaagaaagcgcgccccgggattccttcggagcaagctctgaaaggtacaaaggaacgatggtcgttgaacagccgactgcaaggccgagcacgatcctgaaagccaccatatattccgtgcttggcgccagggccgttccgagccccccgatgcaatacagcacagccgctgacataatcgcccttcttcggccgaagcggtctgtcagcctgcctgacaaacccgatccgaaaatcgccccgattaatattgcgctgacaaccagcccttctgtaaaggcattgagcccaagttcatctttcataaacaaaatcgccccggaaatgacgcctgtatcataaccgtagagcacaccgcccaaggctccaaaaaaataaagccaggcattcgatctttttcccttcatcacagtatatcctcctccaaggctcgtcttttaacctttaaccttgtcttgctttcttcaaacctctagaaactcggagtaccattaaaaggaatttaaaaatatgaaacattttatctgttatatcgtcttattataggcggcaaaatgatcagtcccgcggaatttccagagaatccccatatgcaaaacagcaaatatattgtaaaatccaagattgggaaactattttttattaaaatttagacttattcaacaattgtacgtttcaatataaataaaagaggagcttatacatgctacgatcgcagcgaacgaagaaaaagagactaagaaaatgggtgaaatactcactgtttttcattgccttaatcctgacggcgacggcagccgcaggcggctatgcgtactataaagtggcgaacgcctccaaagatgcgcaagtcaccctttccagaggtgaacagtccgtcaagcggattaaagagttcaaccctaaaaaagataacttctccatcctgttgatggggattgatgcccgtcccggacaaagcatggacaaagaacgaagcgatgcgatggttcttgccacgttcaacagaaaagacaaatcggtgaaactattgagcatcccgcgggattcctatgtcaacatccccggacgcggctacgataaaataacgcatgcccactcattaggcgggcgcgaccttagtacagaaaccgtcgaaaacctgctcgacattccggttgattacgtcatggaagccaatttttcagctttcaaggaagtagttgatgaactcggcggtgtaccgatcacgatcaaagaagactatattgtccggcagattaaaaaggatacgaaaggcaaagtcaaccttcaaacaggcgagcagacgctgggcggagaagaagccctcgcttatgtaagaacgagaaaagccgatacggacttgaagcgcggcgagcgccagatggaagtcatcaaatcgattatcaacaaatccaaatcgcttacttccattccggcttacgacgatatccttgatacagtcggaaagaacgtatcgatgaacttgtcgctgaatgatgcaatcggactgatcccgtttatgacgtccattcaaacggtcgatacccttcaattgaaagggagcgattatcaaccgggcaaagtctactatttccagcttgatcaggaaaacctcaacgaaattaagcaggaattaaaacagcagttagatgtataattagaaaaaggatgaatcatattcatcctttttctgttttaatgaaactcaatatttactattgaaaaaatctaaatttaggtttagccttttacataacatgtctttttagggaatactgccgaagagagctgtttttcgcctcccgaaaaacggcaaactgctcttacaggaggttatctttacataatgagattaattgcgatcgatttagacgggactcttttaaataccgaaagcaaaatatccgcagaaaaccgggccgctatcaaaaaggcgctcatttcagactgcatcgtaaccatttgcacgggacgggccacatttgacgtaaaagcgcttctgaacgatttggatattccgattatcgctgcaaacgggggaacggtccacgatttcaactataaactcctaagcagaacgctaatggacaaggaagcgggaaaaaaggccgcccaatacttaacagatcatcaaatctatttcgaggtttatacggacgatgcgctgctttctccttatgacggagagcagaagcttaaagcagagctcgatatcgtcacaagcgccaaccctgatgaagacagggatacgctttggcaaggcgcactgactcagtttaaacaattcggcatcaaacccgtccccgacattcgcgagatttttaacggagacgaacatatttataagctgttgtgcttctcatttgatatggaaaagctgaagaaagcaaaagatgatctttctgcctttccaaaactgggactcacttcttccggaagacatatcatcgagattctgcctgatgaatccggcaaaggccgcgctttaaaagagctggcccgccactatggaatcgagaaaaaagacatctacgcgatcggcgacagcccgaacgatctgtcaatgtttgaggaagccggccatcggatcgcgatgggcaatgcaatcgatgagctaaagcatatcagcacctttatcacgaaaagcaatgacgaaaacggcgtcgcttatttcattaacaaactgctggaaaatgaatatcaataaataagaaaaccgctcgagtccatcttcgagcggtttttttgctgtttctgctactcaattctgacgcttccggcgtatttatctttccaataggcgctcgtctccatatctgctgtcgttacaccggcagacaaggtgacaagaacgacctggccgtttccgatatagatggcgggattcataacagtggttcctttaaagaagacgatgtctccaggctcaagctcctgtttggtaattttcttacccgtgctgtattgtttgtcagcatacctcggaagctccactcctgccgccgttttgtagacatattggataaacccagccgtatcaaagccttctttaggcgatgtgccgcctttttgataaccgacttcgccgatatgcctgatggcttcggatacaatcggattttttggcagggacatgttgtcaaaacgtctgactcctgtgaacttcttctgccaataggaagccgacaagtaggatatcgtcactttatttgaacggctcgcatggataaaccgcccgcccccggcatagatgccgttatgggatattcccggtttgtacgtattgctgaaaaacaaaacatcacccggccggatatcttcaagcttcaccttttgaccgacagcccattgctgttcagccgaccttggcaaataaacgccgagcacctctctgaagacgtattgggtcaaccccgaacagtcaaatccgagatccggagagttgcctccaaatacataaggaacaccgacatagctttttgctttttgaacgacaggatccatcgaaatctcaggctcttttgtgatccttttcgctttaaaataccccgagctccagtaagagctgccttcaagctttgtcacgacaaccccgtttgattttgtgctgtggatgatttgatcatttcccaaatagatggcgacatgggtcggtccgtccgattccagctcggcattcttgaaaaagacaaggtcccccttttcgagctgctgacggccgacactgctcccaagagtcgattgttcctttaccgttctcggaagcgtaatatcgagcgattgaaacacatattgcacaaagcctgacgagtcaaaccccgttttcggcttctctccgccgtagctgtatttcgcaccctcaagctgtctggcagtttccgctattttctcgccgatcgtatcggcgcgtacatcattatgattcgttaaaaataaagacatccaaagcaccgcaattccacaaaacaaaaccaactttttgtttgccgctttttttatcaattgatctgttcctcctcttctttcctctttcatcgtcattcaactgggatatttaaaggactttttttgcatgtacagcagcgtcatagcgagaagaaacgctcagcacagcatgatcagctttttcacctaagcgcggattaaaaagatgaagggaaatattctaaagaggtcatgaacatgaggtgcggttcccatcccgaattggtaaggtgatgcattttcaaattttgcttcagtcgaaatttgtcagtttttattcccttcaaaagaatacaataaacatgaaccccaaaaccatgtatatatcctcctgattttctataaaactttatacactgaccggttaagaaaattgtcgtgtttccctttcaaaccggccgcttttcacaggtcttttataaccgggatcagcacacaaaaaagagagcgccggcggcactctcttttgcactgttattgcttgttttctgttgtttgatcctgctgattcactttttggatctccgtagagattttagctttttcatcgtttgacaattcatcagaatacttgaaagcagacatgaatgcaatgatcaaaactaaacctacgaacggccaaatggctctgacaaatttcatttgttcaccactccgtttttattatttttcagcttgtccgcatgatcgacttcaaacgttaattttccgttctcttctttccagtcgaggtttgttccttttgtcaattgacggaagatcgcttttcgttttaagaagtcgctcttgcctaaaggcgtcggcgttgcttcgcgaatgttgagaggcgttacctcaaagcgccctttgccgtcattcattaaatggtattgtacaagcgcgctgtcccgtgttcttgaccagccctgatcaaatacaaagttgccgaggctgtagaaaatcacagtaccgttatacacttcgatcggttcgagaacatggggatgagcgccgatgatgacatctgctccggcatctgcaatcgccttggccagatccttctgtctgtcgttcggttcattgtcatattcttgtccccagtgcacatggacaaggacaagatccgcttttttcgatgcttccgcaatcattggaataaagattttcggactgagcggcagcactccgcctctgttctttttggctgtaaagttctttgtgtagacgtctgtaaaaccgagcgttgcaatttttacgccgttcacattctgataggatacgtgctgtttcgcgtcttcaagattatttcctgctccgacaagctccagattctcatttgaaaatttattgagcgtatccttcaaaccgtcttccccgtagtccatcgcatggttgttggcaaaattcagtacgctgaagttcagctttttcaatgtttcgactgattcttgattcgtttgcagatggatgttcttttctgcctcttgatagtcctttgcattggttacagggttttcaaagtttcctgtgataaaatctgacacattaaagtacggcttcacatttttgaagacactttccgaaccgtgcaagtttgtcactttttctacgtttcttcccatcatgatatcgccaacaaaagtagctgtaagcttggcatcttcttttttgtccatttgcgaaggagttttggcgcttccgacccaagtaaagacaaacattaaacagaaaataacgggcaatacgataaagacgtgcttgtttgttttctttttctcctgcttcgtcagcttcagcagtttttcctgaaagttcagttgttttttcatcgatttgacacacctaactttagattagatagtaagcatacataatgacgaatgttgctccgctcaataaaagcgtacttccaagcgtaatcgttaatccctgtctttgaatggtattggcgatcagccccggcacgatgattccgattcccctgaattcggcaatctcaaacggcatcaccggatatataaaatcaaaaccgattttcaaaagaattcccgtaatcagcattgctgcgaattttctgcgtccgtatagaatcataattttggaaagtccgaatttcacgatgacatacgtcagcaaactgacaaaaagaacgagcagcatgaaaatcggctgattgaagacaagtcccaaataacccggtacgacgaggccggctggtacaattcccgttttctctgcaaaaatcaaactgagtaagactcctaaaatgagggcgatatataaatctgatccaaacattgtgttttcttcctcctagctaacgagctgcttaatcttgtaatcttgtattttttcaatgagaggctccgctgctccgtggatatttccgactccgtaaataacgcggccctcaagcttgtttttcagcatgaacatgatttcttccgttgatttgtgctcaaaatcaaacagcttgtccgcaggaattttgcctgcttcatatgctttgacgatcggctctgttgtttctccaatcagcacaagttcacttgcttcaatataaggaaggacatcttccgcaaactgctgtgttctgtctaccctgtcggcgcggcagttcataatgacgatcggctgatccgtaggatagcctatttcttttacacgcttccaaatgtttaaagtggaagctgcgtcattggccgcaaaaccgttgacgaaatgtccgggattcttggcgttcatcagcggcagaattctcatggctcccggatcaggcggcgcattcagcatgcctttaaaggcggtttcttcgtcaatgcccaacgcttgagctacaccgagcgcaagagacgcattatcagggaataccatgtactcaaactgtctgaggtattcatctgttattttagaattgtctgcgacgatgacttttgtgttcctttcttttgcaatttgcttaaagaaatcggtatactcactatcagtaataaccaaatgtccattataaggaatggttgctgtgaatgcttctgcgatttcatccaaagtcggtcccatcacatccatgtgatcctccagcacgttcacgatcacgccgatattagcctgaagcaattcttcctgaaagatgatttggtaatcaggattaacggccatgcactcactgacaatcgcattggcccctctttccaccgtttctttcataacctccttctgctctccgatattcggcccttgcggctttcttttgatcggcttctcttccggtgtgtcccaataaatcatccttgcgtctgtcccggttgtttttcctactgttttgtagcctgcttcgattaatatccctgttgttaatcttgtcaccgtggactttccgcgtataccgttgatgttcactcggacaggcagcgcatcgatattttgctggtggcgccttttttcataaatgccgatcccaacaacgatcacacaggctaatagcattacccacattgtttgtctacatctccttcttggaatctgatatgtaaattcattcatcagtatataggttcactatgaaatcacaatcggcattatgtaacagaagacgacgaaattttccgtgacaaagatcacctcgcccgagtcattaatgcctatctttttattgatatttttggaaatcgaaagttcttaattcctatcagatttttgtcagcgttttaagtatgcgctttcaaaattcgacattatgatttttgtacttttctccctatttcagatgaaaggttgaaggatggattcaggatctcttttttcccccggccgcaatcccctttaaatgggctgtcagccgggatgtctcttttcttttagtattttcgctcttttcgaacaggttaaaaagtcaccaatgttccctcttcaaaacaaatccgtcctatgacaatcagaccatctatcaaaaaatgaaaatctcttttagcataaagcgggattcattgacaaatccaaatattttgtgagtcgttcgatccaccttatttcttcagattttaggttaaaatcctaggatttaaaaagccattaatttttttcaatgataattcatcaaactttaacatttttaatttttcttactattctcattgttactgtattcgccattaaacgcccctatatatgtctcgatatcccagcccggtctaaaatttcagtgttcatccatttttttattgtgattttaaatggatcgtgataatctttatgtaaacggttacacaaatagagaggagaaggcttttttggctacgattaaagacgtcgcacttgctgcaaaagtatctgtcgctacggtttcccgggtattaaatgagacgggatacgttcatgaagacacgagggcgcgcgtgctgaaagcgatggaagaactgaattaccacccgaatgaagtagccaggtctctctataaaagggagtccagactgatcggactgctgctgccggatatcacaaacccgttctttcctcagcttgcccgcggcgttgaagatgagatccaccgcctcggctttcggctcatatttggaaacagcgatgaaaatctggaaaaagagcttgattatatgcagacgtttaaacaaaatcatgtggtcggagtcatttcagcgaccaattatccggatgcgccaaattatcaagacttgtccatgccgatcgtctttcttgaccggacgggcgagaatgcgccggctgtatttgcggacagccgcgaaggaggcagaatcgcagcggctgagatgatcaagaggaacgcgaaacggattacgctgattaaaggaccggctcaccttcagactgcaagagaccgtttcaacggagcgctggacgtgctaagcggagccgatatcgattttcacgtcatgaaaaccgagacattttcatttccggaagcccaaaaacgggcggcggagctgtttggcacatatccggaaacagacggcgtgatcgcaagcaatgacattgtggcgacagccgttttgcatgaagccttaaaacggaagatcaaagttcccgatgaactgcagattatcggctttgatgacataccgcaaagcgaattgcttttcccctctttatcaacgatcaggcagcccgcctatgaaatgggaaaagaagctgcaaaactgctgcttagattaatgaaaaatgaatatattgaacaatcggcagttcagatgccggttgcctttattgaaagacaaacgacaagaaaggcggaatgacaatgagtaaaatatgcgtgatcggcagctcttcgatggatttagtcgtgacatcgcccaagcggccggccgccggagaaacggtgcttggcgaatcttttaaaacggttccgggcggaaagggggccaaccaagcggtagccgcggcccggcttggcgccgaggtccatatgatcggctgcgtcggcgatgatcattacgggaaagccatcctcgacaattttcaagccaatggtgtcttgacagactatgtggaaccggttacaggtcaggaaagcggaaccgcacatatcgttctcgcagacggcgacaacagcatcatcgtcgtcaaaggggcaaatgaccacgtcactcctgaatatgttcaaaaagcgctgcctgcaattaaacaggctgatatcattctgattcagcaagaaattccggaggaaaccgtcgattatgtcagcggactgtgcagctctctcggcattcctctcctgctgaatccggcaccagcccgtccgctacgcccggaaacggtcgaacacgcggcctacatcacgccaaacgagcatgaagcttcggtactgtttcagggcatgtcccgggaggaaacgttaaagcgctatccggagaagctgttcatcacagaagggaaaaacggcgtccgctatcacaatggtctggaagaacgtgtcgttccttcattccctgtcaatgcgattgatacgacgggcgccggagacaccttcaatgcgggatttgccgtcgcgctttccgaaggacaaagcatcgaatctgccttgcgctttgcgaaccgggcggcttccctgtcggttctgaaattcggcgcacaaggcggcatgccaaaacgggatgaagtggagcgtgaactgtcatgaaaaaacacggaatattaaacagccatatcgcaaaattgctggccgatctcgggcataccgataccatcgtcatcgcggacgccggtctgcccgttccgcccggcgtccccaaaatcgatctcgcactgacattgggtacgcccggatttcgagaggttacaaagctcatcgccgatgaaatggttgtcgaaaaagtgacggcagcccaagaaatagaaagcgtcaatcccggtcaagccgcatttttaaaagcggaattttcaaaccaaaagattgactatatcccgcacgaagcattcaaaaaggcaacgagccaggcgaaagcggtcattcgcacaggggaagcaacgccttatgcaaattgcatcttgcacgcgggagtgatcttttagatgtttacattctacatctggaaagaagggatagcccatgcatattaaaatgaaggacatttttaaagcctttggccaaaaccaggtgctgtccggcgtttccttcgagcttcaagaaggtgaagtccacgctttaatgggagaaaacggcgccggaaagtcgacactcatgaatctgttgactggacttcacaagctggacagcggaacgatcgagatcgacggaaaagaaacgtatttttcagatccaaaggaagccgaacagaacggaatcgcctttatccatcaggagctgaacatttggcctgaaatgaccgttttggaaaatctgtttatcggcagagagctttcttccaaacttggatttttaaacaacaagaaaatgaaagcgctagcaaaagagcagcttgaaaggctcggtgtctcaatttctcttgaaaaagaagccggagactgttccgtcggccagcagcaaatgatcgaaatcgcaaaagcccttatgacagacgcgaaagtgatcatcatggatgaaccgacggcagcgttgacagaaagagaaattgaaaaactgttcggcgtcattagagcattaaagaaaaacggcgtctccatcgtctatatatcccaccgcatggaagaaatcttcacgatttgcgacaggatcacggtgatgcgcgatggaaaaacggtggacacgaaacggattcccgacaccgactttcatgaagtggtgaaaaagatggtcggacgggagctgaccgaacgctatcctgaaagacagccaaatccgggacgcgtcgtcctcgaagtcaagcaggcatccaaaaaaggagtcttccaaaatatcagcttttccgtccgctccggcgaaatcgtcgggatttcaggactgatgggtgccgggcgcaccgagctgatgagagcggttttcgggctcgatccgcttgactcgggagacattttcatcgaaggcaaaaaagcggcgctcaaaaaaccgagcgatgccgttcaaaagggaatcggctttattaccgagaaccgcaaggatgaaggacttgtgctcgacacgtccatcagagaaaatatcgcccttccgaatctcgccagcttttcgccgaaaggatggattgacaaaaaaagcgagcaggaatttgtcgatcttctgatcaagcggctgacgatcaaaacggaatcgccggaaacccacgcgcgaaacctttcaggaggaaaccagcaaaaagtggtcattgccaaatggatcggcatcggccctaaagtgctgattttggatgagccgaccagaggcgtcgatgtcggcgcgaaaagggagatttatcagctgatgaacgagctgacagaccgcggcgtcgcgatcgtcatggtctcttcagagctccccgagattctcgggatgagcgaccgcgtccttgtaatccatgaaggaacgctaagcggagagctatcaagaaatgatgccacgcaagaacgaattatgacactcgctacaggaggacggtaacatgaaaactcaaccggctgtgaaaaaaagccttaatgttgattctgtaatgcaaaagctcggtccgtttctcggcctgatcattctcgtcgtcatcgtatcattgttaaatccgagctttttagaaccgttaaatattttaaacttgttaagacaagtcgccattaatgcgctgatcgcgtttggcatgacctttgtcattttaaccggcggcatcgatctttccgtcggagcgattttggcgctgtcaagcgcattgatcgccggaatgatcgccggcggcatcgatcctgttttcgccgtcatcatcggctgcctgatcggagccctgctcggcttggtcaacgggctgttaatcacgaaaggtaaaatggccccgttcatcgcaacacttgccacaatgacgattttccgcggattgacgatggtttatacagacggcaatccgattacagggctcggcaaccactacggcttccagcttttcggacgcggttactttttaggcatccccgtccctgcgattacaatggcagccgcctttatcatcctctgggtgatccttcacaaaacgcctttcggccgccgcacatatgcaatcggcggaaatgaaaaagcggccttgatctcgggcattaaagttccgcgcgtcaaaatgatgatttattctcttgcaggcctattatccgcgttggctggagccatcttgacgtcacggctaaactcagcccagccgacggcaggcacttcctatgaactcgacgccatagccgcagtcgtattaggcggcacaagccttgccggaggaagaggacgaattgccggcacactcatcggcgtcctgatcatcggaacgttgaataacggcttgaacctgcttggcgtctcttcctttttccaaatggtcgtcaaaggtgtcgtcattttgatcgcagtcctgctggaccgcaagaaatccgcttaaggagggctatactgatgaaaaaaacattaacggttttcaccgcattggcgcttctgtttctgtccgcctgctcgctggagccgccggaatgggcaaagccgaataaagaaaaaggaacggatattaaaatcggtttatctgtctcaactttgaaaaatccgtttttcgtttcattaaagaacggagttgtcaaagaagccaaaaaacaagggatagaagtgattgtcgtcgatgcacaggacgattcggcaaagcagacgaatgatgtcgaagatcttctgcagcaaggcgttgacgctttattgatcaacccggcggactcctccgccatctcaactgcagtccaatcggccaattcgcttggcattccggtcgtcacccttgaccgctccgccgaaaacggaaaagtagaaacgctcgtcgcttcagataacgtaaaaggcggacaaatggcagcggactttattgtggagcagctcggcaaaggcgcaaaagtggctgagcttgaaggcgtccccggcgcatcggcaacaagggaacggggctcagggtttcataagaccgctgatgacaagctgaatgtgatcgccaagcaaacagccgactttgaccggacaaaagggttgaacgtcatggagaacctccttcaaggaaaccctgatattcaagcggttttcgcacataatgacgaaatggcgctcggcgcgattgaagcgatcagaagctcagggaaagagattcttgtcgtcggcttcgacggcaatgaagatgcggttaaagcggttcaggccggagacatgtcggcaacgatcgcccagcagcctgaattgatcggcaagctcgccgtacaagcggcccgcgatattttgaacggcaaaaaagttgaaaaaacgatacccgcaccgctcaaactggaaacgaaaaagtaactgtgaaatcagacctcttgatacatggaggtctgattttttttggccacctccataaaagcccttgccgcccggctcaaatggcatttttcaggataagcaaacacaagcgtccgggactgatcggcctgcaaaggaacatagacgatcctgactgaccctttccgcaaaacggcgcgccgaattccggtcctcatcatgcgcaccattgctgtgcaacatgtttaaggaaggttagcgaaagcaaaaaagcccccttttcaaagagggctttttcatttactcgggattgccttcggccgcttcaattccggctgcaagatcgtgtttattgaaatccgcttgaaagaaatcttgcgtattcggcaatctgaggttcatattgagtttttgagaaatttgcaccgtgcattcttcgatttcataatcgaaaacgtgtccgccgacattgcggtcttcatctataaagtgaagatggaagccggaaactgcgattccgttggcatattgcggtgtccaaaagccgacgatcgtccccgtaatatcattaaaatcaaagatcggctgtgattttaccgcatcaaccatcggcacatacggtttttcctgaagttcaactgttctcgttttgactttcttaaaggttccgtccatgcgaatcgcgtaaaacaggttttcactcggcatgatccgtttcatttcttcttcgaacgcctcaagcggcatccgctgcttgatttcgtgatagatatccggccggaagaaagccagcgagcaaaatggagaacaatcgcttccttgaactgggtaggcttttccatcggaacggagacggtaaaactcaccgtcaaaaccgatcagctcgccgtcgagccggttgaacgttccgatcccgaagtctccgtgctccttcgcttcggacatataaaaatccccgtcgtaaattccgtccaataaagataccatcgttgagacctgatagacttgatcgaggttcttatcaacgggctgaattattttttgtttgcttgcacttttcattttcctcttttcactcccttgattttgttcgttgtgactggacatgctgtgatcaagattgcttagaggcttctttattaaaatgttcctcaaatttttttggaaaacgctgatcggccaaatgaatgttgtcgctgtaatcgaccggaatatcaatgacaacaggcccctctgcatcaagaccagctttaagcacctctgccaattcgtcaggtgaattgacccttaaaccttttgcaccaaagctttcagcatattttacaatatcgattccgccgaagtcgactccggacgtccgcttgtatttcatctcctgctggaacgcaaccatatcgtatgtgctgtcattccagacaatgtgaacgatcggcgcttttaatctgaccgctgtctcaagctccatcgcggagaacaggaagcccccgtccccggaaacagacacgactttctgtcccggattgaccagcgttgctgcaatcgcccacggcaaagccaccccaagcgtctgcatgccgttggaaatcagcagtccatgcggacggtaggtgcggaaatatctagacatccaaatcgcatgggagccgatgtcgcaagtcaccgttatgtcatcgctcagcagttcacgcaaatcgcgaacgatttgcagcggatgaacaagatcagtttttgtttctttaggaggttcgctttgctcctccagtgctttcttcaagtaatcaaggacaggtgcaaaggactcgtcgatggaaaccggcagagaatcatgttcaatatggtttaacgtctctgcgatatcgccgatcaactcgatttcgggctgatagtcatgatcgatatcggcttgtatttcgtcaagatgaatcacgcttcgttcgccttttccattccaaaagaccggatcgtattcaatcggatcatagccgaccgtcaaaacgacatccgctttttccaatagcatgtctccgggctgattgcggaatagtccgatccggccgaagtactggtcttccaaatcgtgagacagcgtacccgctgcttggtatgtttcaacaaacggcagtttcactttccttagcagacgccgaaccgcttcaatcgcttcaggtcttccgcctttcatcccgacaagcacgacaggaaggttcgcattgtgaattttggcgatggccgcgctgatttgttcgtccgaagccgcgcccagcttcggcgccggcatggttttcaccggcttggcagttgccggaccggccgtaacgtcctgcggaaagctgagaaacgctgcgccagcctgtccagaagccgccgctctgaatgcattggttacagcctcaggtatgttgttcgcatcttccacttctgcgctatatttcgtaatcggctgaaacaacgccgcattatccatcgattgatgagtttttttgagacgatccgctctttttacagcacccgccagggcaacaaccggatctccttctgtattggctgttacaagaccggtcgctaaattagacgctcccggacctgaagtcaccaggcaaacaccgggctttccagtcaatcgtccgactgccgccgccataaatgctgcattctgctcgtgacggcaaacgatcaattcaggccccttgtctttcaatacgtcaaacaccgcatcgattttcgctcccggaataccgaaaacatgagtgacaccttgctgaatgagactatccaccacaagctctgctcctcttacagtaagagtttcatttttagcggctacattattcaaagccctcactcctccattttcattcatttacaatgaatttttaataaaattattgtattattaaatatacatcttgtggaaattgttttccaatacttctttgtcttacaattaatatgtaaaacgactgaaatcgcattcagaaaggaatgagtgattaatggagctgcgccatcttcgttattttatggttgttgccgaagaactgcatttcggaaaagcagctcttcggctgaacatgactcagcctccgctcagccagcagattaaacagctagaaagtgaaataggcgtcaccttgctgaagaggtcaaaaagagccgtcaggctgacggcggcaggcggggtctttttaaaacaaatcaaggaaggactttcccagattgatcaggccgtcgacatggctcagcggacggcccgcggggagctgggaagactcgtgatcggctttgtcggctccgcaacatacgagatcatgcctcccatcatcagggaataccgaaaccggttcccgtccgtgcagatcgatcttcgggagctttcaacccccaatcagatcgatgcactgctaaacgggcatattgacatcggggtgctgcatcccccgttgggaaacgacgaactgaagtcatacacggtaaaaaaaagccattgtgtccttgcacttccaaaacaccacccgttgacagaaaaagcccgggtacatttgaaggatcttgaagaagaatcgctgatcgtcattgccaaagaagcgtggccctctttatacacggaattcaatttcttgtgtgaaaaagccggatttatccccaacatcgcccaggaagctacagaataccaaatggtgatcggcctcgtatcggccggaatgggaatcgccgtcgtgcctacggcggctaaacgattatttaaccttgatgttgtatacaaagaaatcgaagactttccccttcgcgccgaatggattaccgcacatcgaaaggacaaccgcaatccggcacttaagcatttcatcgaaatctcagatcaacactcatagccgtatagaaaaaaccccgtggacaaatcctccttgttcacggggttttttcctcatatagacgtttgcaagttttgaaaacgcagttaaatgccgattgctgccccatcgcttctcggatcgctcccccctctcaggaagccttgatcgtcaatctcaatgattccggcatgacccatcaccccgtcaaattcaccgacaacggttacatgatgcccatgctttcgcagttttgcaatcacttcaggcgccactctgctttctattcttacaccttccacccgctctccccatgttctgccccatacccatctcggttcatgaacagctgtttgcggatccatcccgtaatctaccattctcgtaataagagccgtctgcgtctgcggctgtccttctcccccttgcccttgcgttccgtaaaggaatttcggcttgccgcctctaaacgccatggcgggcatcagcgtatgaaaagttctttttcccggctccagcgtattgacatggtcgggatcaagcgagaaaaacgcccctctgttctgcaaaatgacgccggtatctccagctgtcacacctgagccgaattcgaaatacaaactttgaataaacgaaacagcattcccgtcttcatctactgctgctgcataagatgtatcgctgccgagcggccggctctccgcctgaagcgccggcagtccgatttttgcggccagctcccgggcatactctttgtccagcaggcgtccaagcggaatctgtgagaattccgggtcagtcaatactttgttgcagtcggaaaaacttaatttcaatgcttcgataagcagatgataatactcgaaagaaccgtgctcgatcatgccaaagtcgtagttttccaaaatgttcaatgtcataagaccggtaaatccttgtgaattcggaggcatttgatagatggcatatcctctgtatgtggaggaaagcggagacacccattcccctcgatgcagcccgaaatcttcaaggttcaagatgcccccgttgttttggagataggctgctaaagcttgggcaatttcccctttataaaaggtgtctcttcctttctcagcgatcaacgtcaaagtgcgcgcgagctctttctgcacaaaacgctcacctggagagggcggttttcctcccggaagataaatatctgcagtgatcggcatacaggaaagccattcagcgtttttcaccgtgttttgacattgatcaggcgagaccgggaaccccttttctgcatacataatcgccggcttcagcacctctcgaagcgatagacggccgtacgcagccagtatttcggcccagctgtccaccatccccggcacggtaatcgcactccttgggcccctgaccggaatggcgcgctctcctttatactgatcccggtccgctttccgccccgaccgcccgctgccattgtaccctttgatctccccgcttccattgtgatacatcagccaaaaggcatcccctccgagtcctgtcatatgcggatagacaacagctaggcacgcgcttactgcaacagcggcgtcaaacgcgttcccccccttctccatgatgatgctgcctgcaagcgaagcgagataatgaggactgacaaccatttgtttcgaaccgatcttcagcttctccatagctcattccttcctttcaagcattcatttgtcctttgaagtatagtggcccgttaaaagaggcgctactttcagggaagaaaaactaacgcccttttttcaataagtattaaaaaaacgttaaaatgattcatatcgaaacccttattatgatacaatttacaaaatgttcatttatagtgtgattgacaagcaatttcgaatgataatgaccaaacagaaaggaagggatatttgtgagcctcgactaccatatgccaaatttaattctcgatgaaacggataaaaaaatcctttcgatcttgcatgaggaaggaagaatctcttatacggatttaggaaagcgtgtgggactctcaagagttgccgtacagacgcggatcaacaacttgattgaagaaggcatcattgaaaaattcacagccgtcatcaatccagtcaaggtcgggattcacgtatcggtgtttttcaacgttgaagtcgaaccccaatatttagaggctgttgccgttgctttggaaaaggagcccgccgtgacaagcctctatcatatgacagggccgagcaagctgcatatgcacggcattttcgcaaatgatcaggagatggaggaatttttgacgaagcgcctgtaccccctgaaaggcgtggtgagcgtcgactgccagatgctgattaaacgttataagagccgaatgggaatgaagctttaactgaataggaggaaacgcaaaatgaagcacccttaccgggaactgatcatcgcaatgacaagaacgggaatattgggctttggcggcggcccatctgttatcccgctgatccgtcatgaagccgtttctaagttcaaatggatcgatgatgatgaattcggggaaattttggcgattgccaatgcgctgcccgggccgatcgctacgaaaatgtcggcatatttaggtcataaagtaaaaggcgttcctggtgctgtcgttgctacagcagcccatatcatgccgacatgcgccgcgatggccgccttgttcgcagccgttaatgtgctcagccactcaaaaatcgtaagcggcatgatcggcgctgtcacccctgtcatcgccgtcatgctcggcatcatggcttacgaatttgggcaaaaagcattgaaaggcttcggcttgctgaccggcgtgcttttctttattcttgcgtttttgggtcttcaagtgttttccatccaccccggcatcattgtcatcctgtttttaacgtatggcgcgttccattttaaattaaaaagaaaagcggcccgagaaaaggataaaggagtgtccgcttcatgatcatcttttatctgttttgggccttctttattgcaaacttattgggctacggaggcgggccagcttcaattccgcttaattttgaagaagttgttcagcattttcactggctgtcaaaagaggaattttcaaacatgcttgcgcttgcaaatgcgctgccaggcccgatcgccacaaaaattgcagcttatgtcggctacagcgtgctcggatggcccggtgttttcattgctcttgccgcaactgtgcttccctcggccatcgcgctcgttttgctgctcaagctgatcggccgctaccgccagtcgcaggtcgtcaaaggaatgaccttgtcggttcagccggttatagccgtgatgatgcttcttttaacatgggaaatcagcggcgacgcgatccattcgatcggcatggttcaatcacttgtcatcgcgctgatctctttagtcgccttgacgaagttccgcgtccatccggctttcctgatcgtggcggccttcgcttacggcgggcttgtcattccgctgctgtagagagggacgtccggccgctttttatcaaatgacattaaaaatcagcgccgcataaccggtgctgacattttggctggggggcctttgtgaacaactttcacagcaggcccaacagctttttctttttgacgggacgcggtgtttctttatgaatctcccggttttccaggagcaggcccgcgttttctgtaaacacgttcaagaaatcgcggccgtaatcgttttctactgtatcaaaaaagaaagatcgggtcgtgaggttgtgggcgtctgatgcgataaagtggatgaggttcgcttcaagaaagcggcgggcgagccgtttgacgcttctgccgaaacggcctgcaagacttgaacatgtcagctgggcgcaggcgccgtttttgacgaggcggtacagcagatcgggattctccatcaattcaaggttccgctcggggtgtgcgatgatcggaatgtaaccatttaattggagatcgaacagcaccttttcggcataacgcgggacatggtggtaaggaagttcaatcagcaaatactttgtgccggcgaggctgagcagtctgccgcgctcaagatcgcgcttcaattcgccgtacaggcggatttcctgcccgggggtaatgagaaccgggatgttttccttttgcattctcgtctttaaacccgaaacagctgcaaggatggcttcttttggatgttcgtatacaccgtttcggtggtgcggtgtggcgataatcgtatgaatcccctggagggcggcttgtttagccatttctaaactgtcattcatacatgctgctccatcatcaacgcccgcaagaatgtggcaatgaatatcgatcatatgcgacctccccgtgttttcccgtttcagaatgtatggtctttgccgacaaagctttccagcttcctggcctgtccttttttcggttttacatacagaatatttcccaacacgtgaacattcagatctttttcgatgtcttcttcatttcgaacggtatttttcaaaagctcgagcaaaaatgctagcccagcgccaaacagaaggccgaaccctgtaaaaagagcgatgttgaacttcttgttcgggctgacgggaacaggtgaatgatcgggattggctttcgcaacaaggctgatttcggcattttcacccataatatcgccaatgtctctttgaaatacggcggcgactgtattcgcgatatccgccgccttggaataatccttgtcagtcgcggagatactgacaatctgcgattcattttcgctgataaccgtgattttttgcttcaggtcttcagccgtttccgaaaggttaagttcgtctttaaccttatttaaaatgatcgggcttttcataatgacgttgtatgtgttgataagttcaaggttggtctggatgtcggtgaagttcgacgtttgacggccgttgatgaggatttgggcggatgcctgatagacgggtttgagccaataaaagttgacggcagcgctggacaaagcagccgcaatggtgatcagtgcgaccagaacgaatctttttttcaaaacgatgaacacatctttaaagccgatatgatctctcataaaagcccccttctacgattcgcgtatttatttaaattttcagcaaattaaacacctacctttgattatacatggttatttcgtttccgaaagaaatgaatcctgacaaataacgggagataccggggaaaccgcgtctttatatggtattaaatatcgacttttgcaggatctgcgcacttcttgctgaacgaaaaagtgtgcaaaccgcagtttgcacaccttttacgtcgtatatccatttttgatatgaagaatgagatcttcaagaagttctttcgtcgttatgtctttcgatttttcaccaacgtcatacgcatgcataagaattctcaaaaattcttcctgattcaattccttgtcatccatatccttttcctttcagcttccataaattaaaacatttctgattatatttcaaattatatgatgtaaagaatcgatttgccatagtctattacattattcgacagccatccgtttttatgtccttttcctgagaaaatcttttttggacggattgattaagctataatagagagattggaaactttttaaaagtcattcggttaggagcgatagacatgcttcaagacatgatctcaaaaacggttgtgatggatgcagctgaacagtttaagcatgtactgccgtgcacagaagaaaacattcagctcatgaaaaaagcccttattttatacagacaggattccgtctatcgggtcaagccgatgagcgggcatacggtcagcgcttacgtccaggacgttgtcccggtaaaggtcttcatcgacctcgccgacgttaaaaaaagcagctgttcctgccctgctcaaaacatgtgccgtcatgtgcttgccgtttacttatatctatatgcacaatatgatcgattgggaacatttacggagttttggaaggaagcgcaaaaacgccgcgaaaaccgggagattctcggacagcttcagcgcggaatgaagccccgcagccacacgctcgatcaatggacctcctttttcaatacggagttcagacgctgggaggagcatacgcctaaaaaccagcaaacgatgcaatacctttactacgggtatttttcagctttaaaaaagcggacgcctgcggagccggagctgaaaaaaatgtatcaaatccacgcggctcttgcgacatggcttgctatgcattcactcgtcgagaaagggcgcatcgatcctgaaaaagatttttactcgctgaatccttatatcgaacagctgatggatacgatctacagctcgatcgatgaactgaaaacatatgcgctatcgttctcccttgacccgtttttagaaaaaacccccggcgtgattcgggaactgctgctcaagaaagatattttccagtatgaaaggctgcggattttcggggagatctggagtgcgcttctatcccggccaaactggctgaagcgggagctcgatgtgctgaacaatctggagccttcgcctgaaatacaattcggcaggctgcatcttgaatttctgctgaaaaacgatgatgtgattcttgatcaagccggatcgttttcaccggagattcttccgtatacgtttcaatggctcagtgtcatgaccgccaaaaaggactggaagcgcctgaaaaaatggtatgaacaccttgagcagctggcggccggcttctgcagactggataaaccgtaccgggaaatacgcgatgtactaagcgaattcttcctgtttctaagcgattacagcaaaaacgcaaaagaagagcatgtatttgaacggtattgcaaagagtgccttccttatacatttactgaatacagccattttttatataacaaaaaccgctttacggagtggatggagatccacagccttgtcggtttttcaatctctgagatagggcagaacgccttgaaagacattgcggcagcggctcctgaagcattgatcccttcctatcacagagaaatttccgggctggttgaacaaaaaaaccgctcaagctacaaagaagccgtcaaacaattaaaaaagctgcgcaccctttataaaaaagcgaaaaaacaggatgtctggaaccggtttatggagcagttttcagcccgctataaacggctgagagccttccaggaggagcttaagaaaggaaagttgatcgatggcgagtcttaaggaaatcgtaatacatgtcgaacagtcagaagactatacatttattttatcttgtcatgacggggatcatcagtttcttacgcgaaatgaaatggaaaggcatttgtttcagtggcacgaatcgtctttttacggaacatttctcgaggaagccggtttagatacccctgcggttctgctgtccccgtggatggcggtcgaatttctcggcaaaaactcatttaattcattcagcgacatcatccttactgaggaaactgaacctttgatgaaaacggcttccaccatttatgagtttatcgcagatgaagactttcttcccgactatgaagcatggaagcaggaaatgctgcgctggaaagataaagaagggattttggaaggctatacagccgaatggttttcacacgctgtcgaagactacatcaactacaatgacgaattaaaagcaaaatgggaatcgattgtcgcacattcccccgcagtcaccacatttcagggacattttcttgatgaagacgattttcttgaaacgattggctggcatgaaaaccctgtgccgtttaccgtcggactccgcttaaatgaacctgactttgacggagacgattggaaaatcgaactgtttttgcgcgacaaaaaaagcggagccattcagttctttgaaggcttgaacaggctgaaaaaatcgtggcaggcatacgctgataaaatcgaccgagaacaagacaggttccgccaaatcgtgccctggctgacgatcgaatcggggacgtcgcttttaacggaagaggaagcatggatcttcctgtccgaagctagcgaaacacttgtcagcatggggattgaaattctgctgccgtcatggtggcaaatcgtgagagacagcaatatgctgctgaaagcaaaagtgtcatcggctccccgcggcgagtcttttgtcggaatgaatgcattgatggacttcaactggcgttttgccaccaatggaattgaactcacagaggaagaattcgagcagcttgtcgccaataaaagacggcttgtcaatatacgcgggcagtggatcaaaatcgacccgaattttatcaaacaaatgaaaaagctgatggagcgggcagaaacagaggggcttcatatgtctgacatcctggcgcgcgagctgacagagcggagcgaaacccgcgaggatgatgatctgttcgatgcttccgcattcagcgatgtacggtttgaactgtcctatcagctgaaaaacatgatcagaaagctgagccagcgcgatgatctcccgtcatacccggtcagcaaatattttcacgggacgctcagagcttatcaggaagacggtttgaactggctgatctttctcagaaactgcggcttcggcgcctgcctggcagatgatatggggctcggaaagaccattcagatgatcgcctatttcgcctatttaaaagaacagggacaacaaacgccgtctcttatcattgcgccgacttccgtcctcgggaactggcagcgcgaactcgagaccttcgcgcccggcctgacggcagcgctccactacgggccaaaacgccctaaaggtgaagcgtttcagacatcttacaaagatgcggatatcgtcttgacgtcatacggcctcgcccaatccgactttgacgatctcagcagcgtcgcctggaactgcatctgccttgacgaggcccaaaacattaaaaatgcgcacacgaaacaatcccgttcaatcagaaagctgaaaggactgcatcatatcgcgctcagcgggactccgatggaaaaccgcctgacggagctgtggtcaatctacgatttcatgaacaaaggctatctcggaagccttggcagcttccataagcgttttgtcctgccaatcgaaaaagaccgcgacgaaaaacggatcgaacagcttcagcagctgatcaaaccgtttttattaagacggacaaagcaggacaaagaagtcgcgctcaatctgcctgagaaacaggaggaaaaagagttcgttccgctctccgcagaacaggcttcactatatgaacagcttgtcaaagatacgtttgaacatatgtcaagcctcgccggaatgcagcgcaaagctctaatcttaagcatgctcggcaagctcaaacaaatctgcggccaccctgccctttacttaaaagagaccgggagcgagctccttaacggaaggtcagtcaagctcgaaaaactgctggagctgacgaagacgattcgcgaaagcgatgaaagctgcttgattttcacccaatatctcgggatgggagatatgatgaagcgcctgctcgagaagtcattcggcgaaccggtcaagtttctgaacggcagcttatccaagcttgaacgggacaaaatggtggagcagtttcaaaacaaggaatttccgattttgatcttatcattaaaagccgggggcacaggcctcaatttgacggccgccaatcacgtcatccattatgacagatggtggaatcccgcggttgaaaatcaagcgacagaccgcgcctacagaattggacagaaacggttcgtccacgttcataaactgatcaccaccggcacaattgaagaaaaaatcgaccaaatgctcgaatcgaagcaatcgctgaacgatcaaatcatccaaagcgaaaattggatcaccgagctttctgagcatgaacttgaggagttatttaccctgaacgcttcggctattacaggttaaataaaacagctgtctgcgatagacagctgttttttgtgtttatgccccttaatgacagtcccaattaaaaaatcccgcgctgattgttcgaattgcccgcggaatcgggccattttttcgggtagttggaacggctgtttcattcttatcactctccttttaagcgggtgatcctattatttcaaattcaatcaatagttaaataggaatagtaacaaaaacaaccatcgccaacaaagaatcaaaagtcataatcatcgaggtcaaaccatattaaaaaaggccgccgacaatgtcggcggcccgcggaccaataacatccgctgcttaaccgcactccttcaatcgttacgctgccgtgtaccggcatcacgccgatttgaaaggatgtacgaattaaaccggtttgacttgctgttcaatcagctgatgcaggatgtgagcaacgccattttcatcattagtgagcgtcacctcatcagccatctctttaatgtctccgcgcgcattgcccatggcaaagcttttccccgcgatcttcagcatcgaaaaatcattgaggctgtctccaacggcagctgtttcctgaagggaaatgccgagcttgtgtgaaagcttctccaatgccagcccttttgacgcctgaagatgctcaatttcaaagttgtgctcggctgaagtgacaagcgtaatatcttgtgcatcttcaaattgcctccagcccgtttccagcttttccttatgaaaagaaaaagctaatatgttatatacattaacatcctttccggctaaaaacagatcggtataggagctgatgtacgcgtatccgttttggctgagctgctgttcagccgcgagttccagccttgataggtctgcctcaggatttgcgcttttcaagcggtccagctcaatgtcaagcagctcgcggccgttttgcggcgtgaagattgcttcatcgctgaacacctcataatagtagttattttcttcaagccatcgaagaattccttctgcccgtttccgatcaagcggcaccgaatggtaaaggctgccttcaggatcatgaatcaccgctccgttggcactgataatccatgttttaatacctgtcggctcaaatatcgtttgaacatcaaaggatgctctccccgtggcaactactacttcaatcccgtgttcccgcgcttttttaatcgcatcgatattttcctttgagatcttgctttcactgtttaacagcgtcccgtctaaatcgaccgcaatcattttcatctgctgtattcccccttaagtatcgtgatgttcagccacaagcagctccacatcgtgttcatcaagcagcttctgaaacggtttcgacggcagccggtctgtaatgagaaggtcaatgtcactgagttcagcgtatcggtaaaaatccgttctcccgattttcgaatggtcggcaagcgctatgacttgcttcgcttgggaaatcattttccgcttcaccattccgtcctcctcatgggcgattgtaagcccatgttcagaaacccccaccacgccgatcagcgctttatcaacatgatagcatgacagcttttcaatgacagaggcgccgtacaaaaaccggtgctctttttgaagctttcctccaagcaggcggatgtcagccccttttcttgaggaaagaacgtccgcaaggttaatcgaattggtgatgatcgtgcaattgacatccggcaaatgctctgcgcatgattggactgtcgtggaagcgtccaaaataatgcggtcgccttctctgattaaagaagcggctgcttttccgatcatgcttttttcttcggaaaccatgcccagcctgcccgaatagtctttgacctcatcatgaacggtgggcagaatcgccccgccccttgtcctgataatggcgccttgctcttgcagtttaaccagatcccgccttgccgtatctcttgaaactccgaataaagaacaaatttgttcaacggaaatccgtttatgctcttttaaatagtcgatgatggaaattagcctttcctcttggtacactggatcattccttctttgcgcaagtaaagttcatcatttataagtgattataagcaattacgccgaataaatcaagagtatataagtaatgataagcaaaaataaagcctgaggccggtttcccgtccctcaggctcgtactttaaaatgaaaatgttccatattgagagtgccaaatctcacgaaacgcatggatatcacgatctacagccggatgatcagccaaacggcttataagctcagggctgattgtcgcctcatggctccccgcttccatgacggcaagaatttgacggttatgtttaaagcttgccgcaagcactttgcaatttaaacagtatgtgttgaataagccgacaatcgttttgacaacgccagcgccattaccatactcttgatcaatgcgattgacatacggcgcgacataggaggcgccggcttttgccgccagtacagcctgtgcagcggtataaaccgttgtcccggtggtctggatattttcagccgcaagctttctgatcgcgtaaagcccttgagtcgtcaccggaattttcacagacacgtttccatctagccagttatagagtgccttcgcctgatcgaccatatcccgccaatggtcggcgatcacttgggcatggagaggcagatgctcgggaagaagccgccgaatatcttgaatctgctgtttaaaaggcttgttctcccttgcgatcagtgccgggtttgtcgtgacgccgccagcgggaaatgaatcaagcaatctttcaatctccggtatatgcgctgaatcaatcagcatgttcatcatcgcgtccccctcttgttttaatgcatgacctgccccccggttacattgatcgattgacccgtcatataagatgcttggtcagaggcgtaaaataagatggcattggcgatgtcatcatacgtacagccccgtcctagaggcactttttcggtgtacacgcgctctacttcgctctctggaatgccgagctttttcgcgtattgcgggatcaagctttggaacatcggcgattttaacaagtttcccggcataatgctgttcacccgaatgttgtgttcggcaagatcaagcgcgaggctttgcgtgagaccgacccctccaaatttagaagctgaataagctgtattatgcttgctgccgacttttcccgatttggaattgatttgaatgattgacccgcttccctgctcaatcatgacctttgacgtttccctcgcgcaaagaaaatacccggtcaaattgacctcgatggtccgttcccagtcttcaagttcaaaatccgtgattttattgcttttggcgattcccgcactgtacaccatcacatcgattttattgaattcgtccgtgaccctgccgatcatttttttcacatcggcttcctttgtaaaatccgcttgaatccacagcgatttgaccccgtattgaccggctgcatgatctgccgtcctttcggcgttctcgccgttgatgtctgcgaccgcgatgtcatatcccgcctctgccatccggtaggacagcgcttctccgagactttggccgccgccgcatatcaatgccacttttcctttattcatctccatattgcacccgctccttatgagaatcttttaacttgaatacagtctcctgctgaaacctccggcagttgttcttttcgttcaaggtacagtgttcccggcagttcggctgaaactgatccgtcaaattttagcgtaatatgcccgagattcgccaagttttgacgaacggctccgccaacggctgtaattttgtaggactcgccgcccagtatgagctcatcgccttcattgaagtcgccttctacaggctttatatcaattgataaacaataatctttcaattcatccggagcaccttcaccaaataatatgagcatcttttcatctgaaaacgccgctgcttgagctccgattctgtttatttttgtttcataaagcatgaccattattctccctccttaagaaaaccctcagctgtcatacatgccaaagctggccagccaagcaataaaaacggttggcgcccccgtgagaaaacgcgaatacagcaccgacggcaccccgacttcaaccgtttcgacttccgcttccgcaagacccagaccgactggaacaaagtcggcagcggcttgtgaattgattgcaaataacgcaggcagcgccaaattcggcggaatgtttcctttgccaatctcaacgccgatcagagaaccgacaacttgtgcaatcaccgcccccggtccaaggaacggggaaagcagtggaaatgaacaaacaagcgagattagtagcaacccgggcagtgagcctgcaaatggtgataaatatttggcaaaaatgtctccgatgcctgactctttaatgatgccgatcaatagagccacaaaagccatgaacggaagaattgttttgataacggtttcaatcgcttcccgtccagcttgataaaatgtgctgacgatcgatcccatggccatcccgattttcgccatcatccctttcggcgactgctgttcactaatctttttctctgtgctataatggttttgtttattttgtatttgtttttcttctggaatattagactgttcaggctcctccacagctcccagcagtttaatattctctttttttactccggaaacatatatatcttctgtaatatgggcggcaagcggcccgcttttcccggtcgccatcacattgatcgtcggaattcgcttttgcgggtaaagtccgcagcgcagcgtccctccgcagtcgatgatcacagcggccatttcgctttcgggtactgtcgttttaaagccgtcgaccagggtgcaccccgtcagctcagctaaatgatccgcaaaatcgggtttgtttccgccggtgacgtacacgattttatttctctcttcatcaggcgtgatcaccagaggtccgccaaaccctccaggcccttttgaaacttcaaccgaacgataggaactcatctcctaaaccgcctttcttatttaagatcaatcgaatctttcaaggcaatgccctgctgtttcgcgacataagccgttgtcatatccgttacccagcccctgagaaagtttgtcacaatcccgactaaaagatagcggagagcaagctccgtcgtttcatgcccgagcgttgtaatccctgcggcaatcccaaggaaaacaaacagctcgcccggattcacgtgtgggaaaagtccgttatgcgtgtggcacgaataggatgcagccgcataatagctcggtttgtatttttcaggcaagaacctgccaagcgacagcgtcattggatttgcgagcatgaacgtaccgatgacaggcaaaaccatgtatctggtcaatggattttttcccgacttcctcgcaagcgcttctacgcgcttttctcctatcaggcgtatcagagcattcatggcgacaagcagcataatcaataaaggaacgatgtctgtaagcataccgacaaacacttctccgccatgcctgaataagtccataaacttttccgcaagccatgttacgtttttcatatttcacctctttttttgatttgaaagctcatcagtttttgaagccgtgttttcttctgcggaacatcaccccctttcgtgatgatgtcgaatgttctcaaggcatcttcaattgcaagacgtgtgaggcggtcgtgccgggcaagctccgcttgtccgatcttcagcaaatactttccttcaaacccttttaaaggtctgattcttgaaaagacggtgacaccttgcatttttgatgccttcaaaattttgttgcgtttgtcgatgacaaacaggacgaccgttccggctctgagtaagccggtcttccttccgaccgcgactctccctatacgcctgtacgcggcgaacgttcgattgaaatgcctgatttgccaaaaacctaaaacgctctggagaagccatgcagctccaagggcgatgataaagtaaatgatcatgattgatttctcacctcctcggcaatttctctggctgtttcggcagttgtcactaaaacattaatatagcggccttttgcagccccgataatcgaaggaactttttcatgggattcggcaagacctatggaatattccaaatcctttaacctgttgatgtctatcgcgatggttctgtcatgaatctctgtttctactaaagctcccgaacgatcaaagaaacgcgagcatatatctccgactgcatgtttttcttcaaggcgctcgatatcctgatcgccgtaaaatccggtccagatcatatttgaagaactaagcggcgccccgattccgacggctgccacagtaaggccgttccacagcctttctatttttttgaaatagtgggacttgacgatttcctccttcgtttcttttttttcgacaacggctgccgcatctatgaagtaaggcgtgcctccaaagtcacccgcaatgctgtagacgatgctgttcacgtgatatttcgtatccatggcgcccggaccgccgaccagcggcacgaatgaagcgctccgttttttgacgccgtgaaactccccgatcattcccgccatcgtcgtcccccatgcgaagcctaccgtatccccgtctttcacgactcgttttaagatttcggctccggctttgccgacgagtttcttcttgtcttcagctgtttgttccggttttgcatcacatatgtacacttctttaagcccgagcagctgttcgagctcccgttccaaatcatagtgtgtcccgacatggtcatcgatcgtgattttaacgattcctgcctcacgcgcttttttcagcatacgtccgacggttgttctgtatatccctgttgcttttgcaatctggctctgtgtcatatcctcttcgtagtacattttgcagactttgatcagaaggcgtttatcatccctcatttccataagatcaccctttacctttgcgcatttgtgcaaacattggtcatttgttgttgtattcgcttacattatacatacggaatttttggacgtcaatttaaatttgtctattttttgtctaaaataaaaaaaccggtcattcaaaaccggccataaaaggggataaacaaggggatattgattgattctttttgagaaaggagtttatagaaggaatcttaggtttaagcatcagccggctcatgcgctttccggctttctcccaaaaatctgactgaccgggcgacaacttctgtaataaaggtgcgttcgccttctgaattgacgtattggcgggtctggattcttccgctcagcccgatgatggagcctttttcgcaatattcggctgtgttcacggcagttttgcgccatagagtgcaattgacaaagtccgcttctacttcgcctgctgcgttcttgaaaggcctgctgacagccagcgtcacatttgcaacagggacaccgtcagatgtataccgcagttcgggatcttttgtcaaacgcccgacgagcatgatctcattaaacatttcgtccctcccttcctgttcgggtatccccagtttataagagaacagattttaagcaaaatcctcataaaagaaaaataacccggaaaaaaacccgggctcatgtcataatttttgcttttttcttccactaatcataaaaatcatttcatttttatttgagaaatacgtatttttcagaaactgaaaaaaaacaggagatgacagccaccgctctgagtatacgcggacatatgagcccccgtcccaagcatacagacggaatgacaactctttctgtttaagcgttacttgaaattcgtatatttccattccgtccttcgtttcatagcgaaacatgatgccttcatttgcatatgtgctgatttcgtgctttttgttaccggctgaaaagcaaatcataggcatatattgacggcagtcagcagctgaattgcttgcgatcacaaatacttcctttaagtaaaaatggttcataagtcacctcctgctcaatatcacctaaagtataaataaaaataaagcattataaaatactttttgcaaaatttaaaatatgaatatgctcctattgcagaaacaaaccagggtcaagagttctcccaagcgaatgtgctataatggttatacaactatggaagcttgtgaggtgatactaatgaaaacctttaggcttattgatttaaaaattgtccgccaggatgacacttcaaagcggcttgaggagttcccgctgatcgacggccttatcattaataaggaagacggagaaaaccactggatggttgaagggctggtttctaaagaataccggtattttttcgaatatctccttcaggaaggcaaagaagtgaaagcatatgtaacgatcacgaaaaaaagcaaccgcccagcacagctgttagcgaaggtcaaaaacatcacggtgctcggcgagcatgtttccgtcttattggacggcaaaatggtcagctcaaagctgaggaaaggctccgacaagattttggaagatttaatgaaagaaggatattccggagatcggcttcttgaagcatttaagcaaaatatataaaaaaggctgtcttcgccggacagccttttcatttatagctctaagaacggtttgtctgctcttttaacaaatcccgtatttccttaagcaattcttcctgaggatcaggagcagctttttcttcttcggcatccttcttcttcagcttagagatatagcggataaatagaaaaatggaaaacgaaataataaagaaattgacgatcgactgaatgaatagcccatatttaatttcggcatcaacaaatgtgaacgacagcgcggaaaaatccaggcctccaagcagaagaccgaggagcggcatcatcaaatcattgacaagcgaagttacgatttttccaaaggcgcctccgatgatgacaccaattgcaagatcgattacatttccccgaatcgcaaaacttttaaattctttccacatgaatgatcaccttttcgctttcatgataaaaaaacaaatgggcttttacgaaaacccattgtgtttacattattcctgcttttcaccaagagaaaacatcaattcggcttcacacacgacttctccgtccacttttgcgactccttttcctttgccgatggaaccgcggaaacgaagcacttcaagctcaagatggagctgatcgcccggtttcacctgctttttgaagcggcagctgtcaattcccgcaaaaaacgcgagccttccgcggttttcttccttcatcaaaagcgccaccgcacctacttgcgcaagcgcttcaacaattaaaacaccaggcatcaccggataatccggaaagtgtccgttaaaaaactcttcatttactgtcacatttttataacccgcggcccgttttccttcctctacttctgtcacacggtctaccagcagaaagggatagcggtggggaatgatttctttaatttgctgagcatcaagcattgccttgacatctcctttttcgaaaaatatgtatagaatgatatgtcagtgccttattctgtacatctggaagtatattatgaaacggaatctttttcaacaaaagatgaggcacaaccggtttaaaacgatgaaagtgaaaataaaaagagcctgaaccaaacgtcgtttggccggctcctgttttgctgtgctaacgtactgaattgatcagccccatcatttgatcgcccatcgtgatggcgcgggaattcatttgatatgacctctgcgaagagatcagatcggtcatttccttcgatacgtcgacatttgatgattcaaggaatccctgttttagagaaatgtcctgccgcccggctccgttcaggttgataagagccgttgctctcaattcatcgctgacagaaaaaaggttgcttccttcttctgttagagcctgaggtttgacagcccggacgatccccaggttaaaacgcagtggcgcttctccctgattgtctgacgaaacggtgacacttcccgattcatcgactttgatgtgtttatagcgctggttgaagcggatggcatttccgttttcatcaaggacggcatgtccttctttcgtcacaagctgcatctggttggcgttccccgccgcaggcgtaaggtaaaatgccccgtctcttgtatattgcacttccccgccgacattgacctggaagtactgataaggagaagtcagtgcaatatcaagatcgcggcccgtctccttaaggcttccctgcttatgcgtcagccggtcggtcatgacggctccgacgccgaggcgaagtcctggcggcgtctttctgcttgcagctacttcattatttttctcgtttacctgttcaatctgctgcctgatcagctccgaaaagctcgtgtttttcgccttatatcccgttgtatcggtatttgcaagattatggctgatattatcaatttgtttttgcagttcaaacattgtgtttgaagccgtgatcatggatctaagcatcgtttttccacatcctccatttacgctgatcgcgatcggtcatttatccgatccttccaatctcattggccgccttttccatgcttttatcataagcctgaagaactttttggttggcttcaaacgagcggtaggcagcggtcatttccgtataggctctcgtcacgtcgacattcgaccgttcggtcatcccctgcttgacagaataagtgacttcaggattgccgactgcgcttggcagcgcctcaccgttttcagtacgatacagatcatcgccttctcttgctaaatttctcgtatcgagcgcgattctgacatcgatcctccccagattttggccgttttcagtcaccgttccgtcctcagcgacttgaaaattctcgcttcccaccgtgatcggccggttttccgttgaaaggacgagtcggccgtttattgtcaattgattattttcatttaaagaaaaacggctgcttcttgaatagcgtacatccccattttcaagccggaccgcgtagaaaagcgccgctttatcgtttgtttcgccgttgaccggaacttcggcttcgctgattgcaatatctgtcggctcattcgtgctttgcagatcgccttgagaaaattgaggcttcagttcctgcatataaacccctgtattgattgaaccgattggcgtctgtgttgaaaacgaacgcgaagcgctgccggctttgaaagaatcagactcaatccggctcaaaagcatttccgggaaagaacgtattgatccttggtcttctttatatcccggcgtatttgcattcgcgatattattcgtcagcatctctgtgcggcgctgctgggtgatcattgctgaagttgctgtataaagtccttttaacatcatttcacctcaaaataagtgtcatgctccagagtttcctatcgaaaaaacctcttttgcgaaatgcttgcaatttatatttgctaatacagaacgtttgttctataatggtattcaaacatactactctttttatcggcagccgttcagctcctttaaagcatttcacataaaaaaacctcattctcaaaaagaatgaggcttctgatcagctcagtttgcgcttgggaagcttgtccatgttatcaagcatgacacccgtaccgactgccacacaatccatcggattttcagcaacgagaacaggcactttcagctcttcggcaagaagctggtcaagaccgtttaacaatgcgccgcctcctgtaatgataacgcctctgtcgataatgtcggctgacagctcaggcggcgttctttcgagcacctgcttggcagcctgtacaatgacagatacagattcgcgcagcgcttcctccacctctttgctcgttaccgtaatggttctcggcaatcctgtgaccatgtcgcggccgcggatggaaatttcctcgtgacgtgcgtctgggaaaacagttgcgactttaatcttaatatcttcggctgtccgttcgcctatgagcagcttgtactcgcgtttgatgtagttcaagatttcaagatcaaacttgtccccagccattttaatagaagaggcggtgacaatatcgcccattgagatgactgcgatatctgtcgttccaccgccgatatcaactaccatgtttccgcttggctggaaaatatccattcccgctccgattgcggccaccttaggttcttcctccaaatatacatgctttccgccgcttttttcggcagcttctctaatggccttctgctccacagaagtaatatttgtcgggcagcaaatcagcatgcgcggctttgagaaaagaccttttacattcagcttgttaatgaaatgcttcagcatggcttctgttacttcaaaatcggcaatgacgccgtcttttaatggacgtatcgcaacaatattcccaggtgtacgtcctaccattctccttgcttcttcaccgacagcgagcactttcccattgtttttgtcaagagcaacgactgatggttcatttaagacaataccttttcctttgacatggatcagcacattcgctgtaccaaggtcaataccaatatcccttgcaaacatctatctatatcctcctcgaaatctgtttcacagcaatgtccacattctgccctaattatatattttatcataaatattagaaaaaaaagagagcttattaaagttcttcataaaatttttgtggctttttacggaggataccgggaaattctgataaacgctgctcgtttctgagccattattccttattgcacgggttctctttcaaagatttcctctttcttgtattttagttttgttgcttctccgccccgcaaatgtctgattgatttatgataatcaagaatttcttttacttcattggccaggtcaggattaatttcaggcagcctttctgtcaaatccttgtgaacggtacttttggaaacaccaaactccttcgctatcacacgaaccgtttttttcgtctccacgatgtacttccctatcttgattgttcgctctttgatgtaatcgtgcacaccactcgacctccctaaaatggatgtgagaagtgtgaaatgagatccgtcttgtgaaaaaattcgctatttgcgcagcttcttcgttttatgcttttccaagtagaattttgaaatactcccacgatccctcacctcaaacactctctttgttaggtttgtatcagtgtattagcatttaaatgggattatgctaaaaactcaaggaggacaaggggtttctcttataattttatttcgggcttcaaaaattttaactttacactaatcttgacttccggtaaaatgaataaagtttattatttacctaggtaactattttgaaggagtccgggaatggaacatatcaatcgaaagattattcaccagctcaatcaaagcactcggatggttgctaaaaaaacgaatgaacagctcgaagcgtacggcctttacggttcacagtggtcgatcctatattgtcttcacacctacggaccgatgacgcagaaagacatatggacttatttgcacgtcgaagcgccgactgtgacaagaaccgtcagccgcctcgaaaaaaacggctgggtcgaacggatacagggcgatgacaaacgggaaaaagtcgtcaagatgacagaagaagccaaaattaaatatgatgacattcaattaaaaatgaaagaatttgaagaggaaatgctttccgtatttgaagaacgggataaaaaaatattccaaaggctgttaagtcaattgttagaaggacaccaggaggagttgtagcctatgaagcaagctgaacccatttggaccagggattttatcatggtcgttttgattaatttgtttatattcgtctatttttacgcactattgaccgtgcttccggtctatgcgatgcaggagctcggcggctccgagtcagagggcggccttttgatcagcggcttcatgctgtccgcgatttttgcaaggccgttttcgggagctgttattgagcgttttggcaaaaagagaatggcactcatcagcgtcgtgctgtttactttggcatcatttctttatatcttcattcacgatatctacctgctgcttggcattcgctttttccaaggcatttggttcagcatcatcaccacggtgacgagtgcaattgcagccgatttaattccgccggcccgccgcggggaagggctgggctattttgctatgtcgatgaatttggcggttgtcatcggcccgtttatcgccttgaacctgctggataaaatgagtttttccgatctgtttattttattttcaggaatcgtcactgtagccatcctctgtacggcactggtgcggattcctaaaggaaacgacatccgttcagctgtgttcaggctgtcattttccaacatgtttgaaaagggcgcgattcggattgcaacggtcggcttgttcgtgtcgttttgttattcaagcgtgatttccttcatctctgtttatgccaaatccctcggccttattgaagcaagcagctatttctttatggtgttcgcggtgacaatgatgatcacgcggccgtttacgggaaaactgtatgataaagtcggcccgggagtcgtcatttatccgtccattatcattttttgcgccgggcttttcctgcttgcttttacaaacagcagtgcgatgcttttgctatccggagctgtcatcggcatcggctacggatctatcacaccgtgccttcagaccttggcgatccagtcttcgccgcctcaccggagcggctatgcaacagcgacttattttacgctgtttgataccggcatcgcagtcggatcctatgttttcgggttggttgtggcacaagccggtttttcaaacatttatttattctcaggcgttttcgtgctcatcaacctgtttctgtatacatggagccaaaaacctgcatccgcaaaggagaagcgggatatatcaatggctgaataagccgttcaacctcgccgggccgggaacgcccggctcttttcatgcaggctgatacagctcgatctgttatttaatgaaacttttgcaaaatgaaatacgtctcctaactgtctgcccaaaaattactactctattaaaaaggtgattttttgaactattggctttttacacgcattcatcaattagcaaaccacaacgacatcctggatggcgccatgattttgattacagaaaaagcgatttatatgtatgcgctcattttgcttttgatctggatattcggaaaccgttcttataaaataaccgttcttcaggccggtgtgacgggtattttcggattggcggcaaattatttgctgtcattggtttactatgagccgaggccatttgtcgctcatcatgtggacgtattgattcaccatgctgccgacgcctcatttcccagcgatcatacaaccggggcgttagccatttcgatcgctttttggctttatcatcggaaaattggaagctgcctgattgctttcgggttattgacgggcttttcccgtatttgggtcggacaccactaccctgttgacgtattgggcagcattttggtcgctttattcgtatcacttgttatgtttagattctccacgtatgtgcagccgctttttgaacggatcatttcactctatgaatcgatcttgcggaaattgcggaaagcggtatccagaacggtataagaaaacacccgaatcatgagattcgggtgtttttttatttccttaaccttttaaggcttcggttaacggcggaacaatttgttttttgcgcgatacaacgcctttcagtgtcgctgtgttgtctgccaatgtgacattgaacgctttttccactgcttgtgcagcttgtcctgaagcgacgacaaccgagtcgtttgttaaaatgtcagttacgacaaacacaaataaatccaaccctttttcagataccgcttttgcaagttctgcgtcaacttcctctttgcgggagagaacgtcgtttgtgtcgacagtgttaacctgcgcgatctctactttatggcttcccatcgtaaactcttttgcgtccagagaaagaagctgaggaatcgtctttgcgctcaaatcagctccggctttcagcatatctagtccatagctgtcagcatcaacgccggcaatcgcagccaattcttttgcagctttgacatcttcttccgtgcatgtcggggatttgaataagagggaatctgagatgatcgccgacagcatcagccccgcaatatcttttttaatttcaacgccgttttctttatagagcttgtttaagatcgttgccgtgcagcctacaggctctgcgcggtaatacagagggtcgctcgtttcaaagttggcgatccggtggtggtcgatgacttcaagcacgcgaacctgatccaagtcatcgacgctctgctggcgctcattatggtcaaccaaaatcacgctgtctgtttcattcgcgacagtgttcacaaggcggggtacttctgcattgaatttcttaagcgcgtattcggtttcgccgttgatttcgccgaggcggacaggctctgcgtccatgccgagctccttttttaattcggcatatgcaatcgctgaacaaatcgtatccgtatccggatttttgtggccaaaaataagtactttactcatgatataactccttactgttgtttttatagtaagcttacctgacaataaaaaaatctgcaaatctgtcacttattttaatatttacgaagtgttttgtcattttaaaaaataaaaaaagagccgttcggctctttttattctccatagtcaggtgtattgtggcttcgttttggagcgggcttcaagaccggtttttctccatatgcgacagggccgctctcatagtgaaattccgctccgtccggcgccttccctatcagccactcaaactgtgcgctttcttctccatccgaaaaattgtataaagagtgcgaaacttcttctttttcatattctggcggaacggtaccgggcacgatgacgccttctttttcttccagctctttgatcgcggcaatccactggttttggtgcatcgtatctcttgccaaaagaaaaccgagcatatcttgtacgcctttgtcatccgtcatttcgtacagccgtgcgacttgcagtctgccttgcgattcagcgttgacatttgcgcgcaggtcggccagaaggttgccgctcgctacaatatagcctgcattccaaggaacgccggtgctgttttcaggcatggcccccagacctgaaacgattgcgtgatgagggttcattccgcccataatggcgccgatgacaggatcgtctgctgctttttcctgctcgtaaaccggagcgtcttcaagcagccgtgcaatcatcgtcgcaatcatttcgacgtgtccgatttcttctgccgccgtatccatcagcaaatctttatacttttcatttccccgcgtattccacccttgaaaaaggtattgcatcgccacagatatttctccgtactggccgccgagtatctcctgcattttctttgcgaagacagggtcgggtctttcaggtttggcagggtactgcagcactttcgtatgcttgaacaaatcagatcactcctccgttttttgtatcctcgtttttgatttagccgaaaagggaaatcataaaaccgtacaacaggttcgggatgtgcttaaaacaggtcaaaattcgaaccaaaggagagctgttctatgataaaaaatacttctcaccgcccttttccactgcctgaaggaccgtggatgatgacgcaaacatggaatcatgtattatttgcccattgggctgtcgatcctgaagccattcgcggacaaataccggcggccttggaattggagacattcaacggaaaagcgtggatcggtatcttgccttttctgctgacaaatatgcgtccccgttttttgccgccctttcctttcatcagcagatttcccgagctgaatgtccggacatatgtagcatataaaggcgtcccgggcatttattttttcagtcttgacgccgcttcgcgcttggccgtcgccggcgcgcgctcaatgttccacttgccttatttttacgccgggatgcgctttgcacaacataaagaccgctttcagctgacaagcaggagaaaacgttcacaagcagagttttatgcagaatatcaaccggtttcggagcctttctcagctgataaaggaacgcttgaatactggcttgctgaaaggtaccgtttgtacaccacgcataaaaacgagctctattatgaagatatccaccattcagagtggcagctgcagcaggctgaagctgatatttttccgggtccgctcacaagcgcaaacgatctcacactcccagacaccgcgccccttcttcattatgcaaaaaggcagcacgtcttattttggccgctgaaaaagtgggaaagtgaagaaacataaaaaaggaagagctaaaaacgctcttccttcaacctgtttaagccggttttgaaatttcgcttaaagcttctcccgctttctcatccgcatgtgagacggagagatcccccaaagcaacgattccgacaagacggtcatcttcaacaatcggcagcctgcgaatttggtgttccgccatcagatcaccagcctcttcagcagacatatccgggcgccctgtcaccatctgtgtgctcatgatatcccgagcagccgcatctgtttcattttcagctacacatctgataacaatatcccggtctgaaacgatccccgtcaattttccgttctcgcagaccggaattgaacctacattgtaatcacgcatcttaccggcaatttccgcaatcggggcagaaggctcgcagcattcagcattggttgtcatgatgtccttcagtttcattcggaattcctcctttatgatggggttattatgtgcttttccgatataccgcgggcttaaacctatttaaaagagcccttccttttcatatatcgttttttatccctcaataaatcgccggtccagcctttctttttcaaataccaatacacaagggcggtcgaaacggcgattaaaataagcgaaaataaatagccgtactttaaagagagttcaggcatgacttcgaagttcattccccacagggcgccgaaagccgtcatcggcgtaaagatcgtcgtaaaaatcgtcagcgctttaaaaatttcattgcctctgtgggatgtcaccacttcctcggaatgaagcaaataattgatttcattcgcatactctttgatcaatgacatgcctctgtcgatttcgtaaaacgtcctgcgctgttcgatttcgtcaaacgatttggttaaaaaagtttctttaaggcccattgcaacctttttcatcgataaaattaaacttcttatgaccaggagttcgtgacgccgcttatgaatcagttcaatgatgcttttattgttgtcatgatgaaatccccaccttacttttccaaggtgaacttcaaagtgctcaagttccttcaaatacattctcatcagttcgcccagcaggaccaggaacacttcaggggcgtctttgcatcgctttaagtgttgatcgatcggccttctgtttgcctcttcaaattgcgagatatctaaattcattgtgaaaaaatagtctttcgttaagtaaaaatgaaatgctgtccggttttgttgaacttccgcttcctggtcgtaaatatatgaaccgtagatcgcttccttgccttgaacggcagcattgatatcaaggcaattgatgttggccgagggaacgccttgaaaccagtttcggcattccggccaatgatcgggctggatcagcccttgtgctgttgttttttcgtgagggccaagctgataccatgtccagccctctccctgaaaaactctcatacttgtctcctcctcttccggcccactcgttttatatttctttgcccgccctccgcgtaaataaacatgatgtttgccgcgctgcggcacgtggtatgaagctagtatgagtttttcatagaaaaggaggtggcgccttctttactgagaaggcggggcattggagttattgaagctgattgcagtagcaggattaatcgcatttacgggctttttcgtcgcggtcgaattcgccatcgtcaaagtaaggcggacaaagatcgaccaattgatcattcagaaaaaaaagggcgctcttgccgcaaaagaagtgacctcgcaccttgacgaatacttgtcagcctgccagcttggaatcaccgtgacggcattgggcttgggctggcttggtgaaccgacgatgcagaccttgctgcatccccttttctcaaaaatcggcttgaacgagtcgattacacatattctttcatttttggccgcttttttatcagttacttatctcaatgttgtcgtcggagagctggcgccaaaaacgatcgccattcaaaaagcggagaccgttacgctgctttttgcacagccgatgatctggttttatagaatcatgtttccttttatatggctgctcaatcattcagcccgcatgatcacaagtctgttcggcctgaagccgaccggtgaacacgaattggcctattcggaggaagaactgcgaacgcttttatctgaaagctatcgaagcggggagattaaccaaaatgaattgaaatatgtaaacaatatttttaaattcgacgaacgtacggcaaaagaaattatggtgccgcgcaatgaaatgaccgtcttatctcttgacgacagtttaaaaaaagcgaagcagcttatcaaagaaacgaagcacacccgcttccccgtcatggaggaagacaaagatcacatcaccggaatgatcaatataaaagaactgctgctggcggagcttgcaggggaattttctttagaaacaaaatcgctaaagccatatatccatccggttatccatgtgattgaaacgattcccgtctaccagctgttcgtcaaaatgcagaaagagcatacacatatggcgattctcgtagatgagtatggcggaacatcgggtcttgtgacggttgaggatattgtcgaggaaatcgtcggcgacattcgcgatgaattcgatactgaagaagtatctgctgttcagaaactcgaagatgaccattacatcctaaacgcgaaagtactggtcagcgacgtaaacgacctgcttggaattcatttatcagatgaggagattgatacaatcggcggctggatgctgacgcagaatattgagagcaagcccggaacgacgatcgaaagtgaaggataccgttttaaagtaaaagaaatggacggacatcgaatcgttgcagttgaggttgaaaaaaccgcttaatcccccttctgtcggatatttcagcctctccctgtccgcttttctccccaaaaaccatgtaaggaaatctgacatgttcatcatgatatctcccttttgtcactataatgaaagaaacagagatctgctctcaatctaaatgactacggaggaatgaaacatgcagatgggggatacagtatttatgttcttttgcgctttgctcgtgtggctgatgacgccgggcatcgctttattttacggaggccttgtaaggagcaaaaatgtgctcagcaccgttatgcacagtttatcttcaattgccatcgtttctatcatatggattttgttcggctattcactcgctttcgctcccggaaacccattgatcgggggtttggattggatcggactgcacggtgtcggttttgaacccaatgccgattattcggagacgatcccgcatacgctttatatgatgttccaattgacatttgccgtcctgacgactgcgattatttccggaagctttgcggagcgcatgcgctttccggcctttattcttttctcggtgctctgggcggttttcgtttattcgcctgtcgcccactgggtatggggcggaggctggcttgacgagctgggagctattgattttgccggcggaaacgtcgttcacatttcttccggggtagccggtctggtcgttgcgattgttctcggcaagcggaaaaatatgagcgacaccgcccctcacaacctccttctgaccctgctcggggcgactttgatctggttcggatggttcggtttcaatgtcggaagcgcgctgacgatcgatgaagtcgccatgaccgcttttatcaacacgaatacggctgcggccgcggggctgatcggctggattttggcagaatggctgattaataagaagccgacgatgctcggcgccgtctcgggagcgattgcgggactcgtcgcgattacgcctggcgcaggttttgtcacgccattctcatctgtatggatcgggcttatcggaggaatcgtctgtttctggggggtgttttcgctcaagaaaaaattcgggtacgatgatgcgctcgatgccttcggacttcacgggctcggcgggacatggggcggaatcgcgacaggtttgttcgcgacgacatctgtcaacgcagacggtgccaacgggcttttttacggagacatcagtctcctttggaaacagctgattgcgattgctgcaacatatttgtttgtcgcaatcgtcacatacgctattattaagatagtcagtatcttttttaaactccgtgcctcagaggatgaagaatcattgggcctcgatcttacgctgcacggcgaaaaagcgtatcaagattaatttgtcaggagtgatggtatgagcggtcaaatgtataaagtggaaattgtaacccgtcctacaaactttgaaaagctgaaaacggagctggccaaaatcggggtaacgtccattacgttttacaatgtacacggatgcggcctgcaaaaagggcatactgagctttaccgcggggtcaaacgcgaaagcaatgtgtatgaaaggttaaaagtcgaaatcgtcgtcagcaaagtgcctgtcgaaaaggtggccgagacggcgcaaaacgtcctgaaaaccggggaacccggtgacggcaagatcttcatatacgaaattaaaaacaccatcaacatccgcacaggcgaggaaggtcctgacgctttataaaaaagatcgaagctcccggctggagttaagccgggagcttttctaatgttacaaaacagcatcaataacaccgtatgccttcgcttcgtccgcatccataaagtaatcgcgttccatgtcggcttttagtttttcaatgggctggcccgttcgttcgtgaaagaagcgctcgattttttccctcagtttgatgatccgcttcgctgaaatctccatgtctgtcgcctgtcctttgacgccgccgagcggctgatggatcatgatttcgctgtttttgagtgcataccgtttgccttttgctccgccggcgaggagaatcgctcccatggaagcggccattccgacgcatatcgtgcggacatcaggcttcacataatccatcgtatccaaaattgcatatcccgcggaagttgatccgcccgggctgttgatatagatcgaaatgtctttttcattgtcttcagctgacaaaaacagcaattgggcggtgacccgattggcgaggtcatcgttgaattcagaaccgatcataatgatccggtcttttaaaagtctggaaaaaatatcgtacgatctttcaccggcagccgttttctcaatgacgtaaggaatggtgttcatagcatttttcctcctaggcagcgcacctcatcatgctgatgcaagacggctgtgaagcgtcgaaacgccatgtctgtttggcaaattcgagcaggtcatcggggttgtgatgcaatatcgcccgaacaagcagaccgatgtgttcgtcatccccgtccgccggctccttttgcagaacctccggagaaagcctttttaatcgctgacgcgatctaaataaaagcgacttgacggatgattcgggcttaccgagcgtctcggcgatttcgtgcagctgaaaggaaaacacatctttgagcagaaaaatcgttaattgcttcggtgttaaaataccggaaagctgtttcagcaggtgctcgaagtcatcggccgccttcatgcgctctgcccgcccgtcttccagattatcttcagacagaaagctttcgcgcttcctttttctgagcaggtcaatccatttatgctttgcaaccgtcttttgataagcatgtgacgcgtctgttcgattgatttccattaacttgaggattgtatcctggactaaatcctcggcatcccatttatcgcctgtcattctcaggcaatacttcatcagcgcttgctgttctaattcattcatgaatgcattcacactccttaaaagaggcctcttacttaataaacggctggctccgccgatttgatacgggtttttttatgattgtaacaaaaaaggcgcctatcgcatttgataggcgccctgagggaagcgtgccttatgactggcttgaatcgtcagactgggttccgtcttgattttctgacccttcagacgaatcttcccgcttggttttgtcgtcttttccatctgtttgatctttcgctttgtcttctgtttttgacttttcttcaacagaaggctgagcaggttctttcacttcagacgcttgttcctccattgctttttcaatgctggagaccggcttgtccatgaagttcagcgggtttagcgcaacaccgtctttgcggatttcaaaatgcacatggtttccgccttcttcattgtaaaggtttttgcctgcttttccgatgacttgattttgttcaatcttgtcaccttgtttgacgcttacttcagaaagagactgatacacagttgataaaccatcttcatgttcaacttcaacaacgtagcccagtacagggtcttttgcagctttgatgaccgtaccgcttagagatgcggaaacatcaaatgtttttccgtctttctcagccaagtcgatacctttgctcatgctgtacgtgttattatagtttacaagtgctgcttctttctcttctttagttgcgtcagtttcaaaaaactttttaacgacggaaacattttcagaatcagcaaccggcattgcgacattttcgactggtttgcctacttctaccgcatcatcccggttatcataggctgatttcttgccatcgtctgcaagctggtcttttacatcgttgttagaagccgattgataccatagaacggcggttaatacaacgacggcacttgtcaaatagatggccggaaatacccagcgtttacgaaaaaattgttgcagctttgtgattttggaagtacgattcttttcttcctctttcataactcatcacctcagcaacattctgaacacttttcagaaaatatatacatttacaaaaaacttttttcaatttattttgcaccggctgtttcgtttttatgtaaaaccgccctgaaaatctgaaaaatgaccggtatgcatgataacggaaaaaacgccgaagatataacatatgaagaaaggatagagagaatgaaattacgaatcgccaatcgggaagaccttcccgcagtagtcgatatttacaactccaccattgcgtcgcgaatggtgacggcagatacagaacccgtcacgcctgaagaaaggctgaactggtttttgagccataccgaagaaaggcctctttatattgcagaaaatgaaaaacgggatatcgtcggctggatcagctttgaatcattttacgggagacccgcctacgccaaaaccgccgaagtcagcatttaccttcatgaagaccaccgcggcaaaggggcgggttctgcggtgcttgaaaaagcgcttgaagctgctccaaagcttggaatccgttctttaatggcgtttattttcgctcacaatgaaccgagcatgaagcttttcaaaaaatacggcttcaccgagtggggacactttcccggaatcgccgagatggacggaatccggtacgacttaaaaatattaggaaaagaattgaatgaagcctgatcatcatgacaaaaaaagagctgtcatgcagctcttttttccatcaatcattcagccagcctgcgccttctgatctcttcttcatttaaaaattccaaaaagcttctcattacagtaaacggctcttctttgaccgcccgaacgtagcggcttttccgttcatcggaaagcacttcgcttgtttgcatccgttccaatatatacttcatcaccgattgctgaacatttcttttttggtatgacgactctctgaacagcgccatgccgaatgctgcacctgcggcagcgcagccgatttttatcattgaatcggttccataagctgcctgcccccaaaaagaggaaagataaacaaatgaagcaagaagcagcggaatcgcgataaaaagaaaaatcagccttttctttaagaacggcgccgccacgcgcttgaggttatccatttcctctttcataaaggccggcatttgatggaaacgttccatatccataatcaatccctcccgttttggttaaagaggcgttggtccgctaattaaatcacgctttttatatgtatatcgtaacttagatccaacatgttttacagttttttgccttcctccctttttctttagaaactttccggccgccgccccgtataacatgagatagttgcttgaaaggggagtaactgttataaatggaatgtataaaaacaaatccgtcttgtgaggttcaatatggatattattaaaaatatcagtatcacatcgatatttctcggttttatattagttttaaatacgcttttggcaatcgttgtgatctttagggaacgccgggatgcaagctcctcctgggcctggctcttggtgctcttctttattcccgttctcggctttatcctttatttgctcttcggccacaatttgagcaggaatcacctttttcaatgggaagaccgaaagaagatcgggattgaaaaaatattggaacagcagctgaccaagctgaaaaaccgcgagtttgaatttcgcaataaagcgacggcggacagcaaagacttgatttatatgcacattttgaataaccacgccgtttttacagaagacaatgcggtcgagctgttaacggacggacgccagaaattcgacaggctgcttcgcgatattgaaaacgccaaagaccatattcatcttcaatattatatttataaaggcgatgagatcggcaaaaagctccgggatgcgctcatcaaaaaagcaaaagaaggcgttgaagtccgcgttttgtatgatgaattaggatcaagaagcctcaggaaaagctttttcaaagagctgaaaaaagcgggaggatttgtcgaagtctttttcccgtcgcgctttaaatttatcaatttgcgcatgaattaccgcaaccaccgcaagctcgtcattatcgacggcgtcatcggctatgtcggaggatttaatgtcggagacgaatatctcggtctgaacccggcctttggctattggcgggacacgcacctcagaatcaaaggaacagcggtccactcgattcaaacgcgttttatcctggattggaatcaggcctcgcaccatcacgacattacatatatgccaaaccattttcctgacatcgactcccacggaaacatcggcatgcaaatcgtcaccagcggccccgattcagaatgggagcagattaaaaacggctatattaaaatgatatcaacggcaaagcggtccattcttattcagacgccttattttataccggacgcaagcctgctcgatgccctcaggatcgcttgtctgtccggcgttgacgtcaggatcatgattcctaacaaacccgaccatccgtttgtgtactgggcaacctattcttacatcggcgaacttttaaaagcaggcgcctccgtatttatttacgacaacggttttatccatgcgaaaacgattgtagtagatgaggaaatttcatcggtcggcacggcaaatattgatatgcgcagcttcaagctcaattttgaagtgaatgcatttttatatgatgaggaaattgcgagaagccttgtcctatcatttgaaaaagatctgcaagtgtcaagggagctgacctttgaggaatatttaaacagaagcaaatcgatccgcttcaaagaagccatttcgatcctgctgtcgccgattttatagcgcacaattcatgctgttaaaaaaatcctcccggaaacgggaggatttttgttttactcaccagaagctgccgcacctttgggtgctgaagcatgcttgtccatttgacggcctgtgtcagcgtccttgagcttgagtgcgatgaaaagcgcagccatgaggaaaccggctgcacagagcaaagctgtccggtaagctgataaatcaggctctatgcctgcgctgggctggctgagcacagcaaggacgcacgacatgacagcaactccaaaggcagatccgagccggttttgcacattaaacagcgttgttgcccggcccattgaggatgatgaaatgttggcaaaacaaacaacctgcgccgcaccaaccgcgtgccccaagaaaaagcccgctaaaaacagcagcagcctgagaagccaaagatttgacccatatccggtcaggctcagcagcccaaacagcacagcagcgcctaacagcgcaacggaaatgacccgcctcgggccaagctttgccaacgacctcggcatcagctgggacgccagcatcaagcctaatgcttcgggaaacgtaatcagcgcagtatctgtcgcagagtagccgagtgcttcctgacacaacagcggaaatatatagagcatgccaagcagtccgcctgctgtcagaagcgaaatgacgctcatcattccaaaaacccggtccttcaataagcgaagttcaatcaacggatgctcagccttcagttcgacaaaaacgaggattgcgaggagcatcattcccccggcccctgctgcaagcacatccggagagccgaatccacgcgcaggcccctggctgagtgcaaaaaccgccaacgccattcccggcgccgccaaaaggaatccaagccaatcaaatctgcccgcttccggctccaaatgttcatgaagatacaacaggccaaacagcagaatgatcattccgatcggaatattaatgtaaaaaatccagcgccatgacagctgatctgtcagaaacccgctgatgatcggcccaaccgcaggcgcgacggcaattggaagaacgaggactctcgaaattttggcccgttcatgcggaggaaacgtcctgaacaagatcgccattcccaccggcgtaatcaacccgccgccggccccctggatcacgcgaaatgcgtttaacgccgccagattgtcagcgattccgcataaggcggatgcagctgtaaatatcgaaagcgcggctaggaaaacacgctttgtcccaaagcggtccccaagccagccggctgcgggaagacagaccgccaagctgactaagtatccgatgttaactgtgcctgcagcagacggcaatgtttgaaattcggtcatgatggcaggcaatgccatgttgatgacactcgcatccatcgcagccataaacatggctgttacatatacaatgctgacaaccgtcctttgattgaacggccttctattcattgctgaccgccgtgtacttctgcaaccagcttgatgctgttcggcgagagatcggtccaattcgagctgatatagtcgatacaggcgctgcggctcgcttccccgcagacgacctcccaccctgccggaatatgaatgaaggccggccagagtgaatactggccatcctgattcattaaaacgacatatgtgccgtgttcattttcaaaaggatttgtcatcgctatctctccctacttatccgtatcttttttcaagtcgtccagcttttccgaaacccgacgtccgatttcggccagcggctccggctggcacaaatctttatgccggcaatccatatcatgaatatcaatgtttccgttcaaataaggtagccatgactccggatcgatcggatcaaaccattccggtatcacggttgatttgaaaaacagaatatcgccatgaaagacgcggggcttatattcgcttaaaatccggacggaattcacatacgtctcctttaagttcaagatcgcagcctcgtccaggctggcaagcgcactgccgtcgcggcgcagaatatcgatcgcactggaaaggttcagcggtgccccgtcaaggctgtccgggtcgtatcctcccaatgccaagagggcaatcaatgcttcctgctcatcaggcgcatctttaattggaaggaagtgattcgggtaagcatcaagcatgacaagaagcgatatgtcttccccttgttcctgcagctgagttgcgatcgcatgaacaacattgcctccgagggaccagccgagcagacgataagggcctgttggctgaatcgtacgaatgtgccgaatataatcagcagccatgtcgtcgagcgtatcaggtagctcttcctgccttgcgatcccgcgggcttgaaggccgtatatcgggtattccttgccgagtgccgtcattaaaccggcataacaccagctgaggcctccggccgggtgcacacagaacaggggatcttgactgcctccggttctcagcggaagcattacatccagcgcactttgcctgccgccggattcaagccgttcagcaagtccgctgactgtaggcgcttcaagcaggtcgccgatgccgagttcgactccgagcgcttcacgaatgcggctcatcagctgtacggcgagaagagaatgcccgccaagttcgaagaatccgtcatcaataccgactctcggcgcattgaggatttctgaaaaaagatcgcacaggatttcttcctgcggtgttcttgggccccgccctttaacagccgcggcaaagtcaggctcaggcagcgcttttcggtcaagtttgccatttggagtcaatggcagctctgaaatttttacaaatgcggaaggcaccatgtactccggcagagtgcctgcggcaaaccgtcgcagctcagccggatcggtttcttcttcagacgccgggacaacgtaggcgatcagacgcttgtccccgggctggccttcccttacgaccacagcggcttgattcactctatgatggcggacaagcaccgcttctatctcgccgagttcgattctgaagccgcggatcttgatctgctggtcggcccgccccatataatccagagagccgtcctggcgcctgcgggcaagatcgccggtgcggtacatccgggttcccggcggaccaaacggatcagcgacaaagcggtctgctgtcaaatcgggtctgcccaagtaaccccgtgcgagaccgcccccggacacatacatctctccggtgacgcccgggggcaccggttcaagatactcatcaagcacatatacacctaaatcgggaatcccctggccgatcaggctgttcgcttgaagtgccgcagtctgctgatcgagagaaatatagctgacatgcaccgtcgtttctgtaattccatacatattaatcagccgcgggaaatgatccggatggcgttcataccaatcttcaagcctcttcagctcgagcgcttcccctccaaaaatgataaagcgcaaggaaaggagctttcctgtctcagcattgtcccggtcagcctgcatcaattgataaaatgctgaaggagtctgattgagcacagtcactccctcgcgaacgagaagattgagaaattcggccggcgagcggctgattgtatgaggcaccacgataagccggcccccattgagaagtgctccccaaatttcccataccgaaaagtcaaatgcgtaagaatgaaacatcgtccaaacatcgtcagcgccgaaatggaaccattggtcagtcgctccgaacagccgcacgacattttgatgcggaacaacgactcctttcggcttgccggtcgaaccggatgtgtaaatgacatacgccgggtgaagaggcagcaaaggcgcggtgcggtcggcatcacacggattcgcagcagcgcatcctttcagttcctcttgtatacaaggatcatcgagtacaatcctttcaacagatccgggaacagaaagatttgattctaccgctgaactcgttacgatgcagacaggatgggcatcattcaacataaacgctatcctttccgccgggtagtccggatctaggggcacatatgccgcgccagccttcagcactgcaagcaatccgacaaccatatccaaagatcttggcagcgccagggcagcaaattgttcggggccgacccctttggcgatcaggagatgagcaagccggttagcgcgtttattaagctcgccgtatgtgagcgcattattttcacatataaccgcaacagcttccggatcctttgccgcctgcttttcaaacaaaacgggcaaagatgaacaaggtatgctgttggacgatttgctccaatcagccagcatgttttcccgttcggccggaaggagaatatcgagtttttcgatcggctgatcagggtcgtctgctgctgaatccagcagcctgacaagccgttctgccaatgtttgaaccgtatttcgctcaaataaatctgtgctgtattcaagaaatccgccgatacctgcgggtgttccgtccgcttttcgatgttcgcgaagctcaatcgtcaaatcaaacttggctgctccgacgctgcgaatttcaatgtctgacttgaggccggaaaggtcaagctcaggttcaggcgtattttgaaaggcaagcataatttggaacagcggatgtctcgctcttgacctgcgcggattaagcacttcaacaagacgctcgaacggaaggtcctgatgctcatacgctgcaaggtttacttttctgactctgttcagaagctcccgaaaactcggattacccgatgtatctgttcgaagcacaagcgtattaacaaacaatccgacaatttcgcctaaagcatcatcgtttcttcccgctatcgggctgccgagcggaatatcatggcctgctccgagccgtgtcagtagtgcggcaagagccgactgcaaaatcataaacatgctgactccggtgctgcgggacaaatcgaacaggcggccgtgcagctgttcgtcaatgctgagatcaatcgtaccgcctctgtagctagattccgacggacgcgggtgatcagtcggaagctccagctgatcaggcagatgttccaatgccttcgaccaatattcgagctgtttggcaatcagactgtccggattgttctcactgccaagcagatattcctgccatacggcatagtcggcatattgtatagaaagcggctcccaaacaggtgcctcaccttgcagacgcgcattataggcggtttccaaatcacgggtcagcggcattaaagaccagccgtcgccgatcatatggtgcaaaagcagaagaagcacaaatttgtccggtccgagtacgaatagctgggcgcgaaacggaggctccttttctaaatggtaacggtgccggacggcctcagccaggactttttccaactcatgttcgctgacatgggatacagtgagttcgggacgcgattgatcctcttccaatatcagctggtgtgttgtcccttgctgatccgggaaaattgttcgaagcggctcatgtcttgttgccacatcacccagagcagctgccagcgccttttggtccaaatctccagttaaatgaacgacaaccggaatattataggtcgggctcggtccttccaaacagtgcaaaaaccataggcgccgctgtgcgaaggacagcggaatctccttgcggcgctctcttttgcgcaatgccggacgggcgctctgcgcctgatcaagctgtttggcaagtccggcggctgtgggctcatcgaataaacggccgattccgagttcgacgccgagcatttcccgaatgcggccgacgagcctgcctgccagaagggaatgtccgccgaggtcaaaaaagctgtcatcaatactgactcgcggcacccccagcacctcagcaaataaatcacacaaaatttcctcttgcggagtcctcggctcgcgtccgcctgtatgcatactcaccgccggagccggcagggatttgcggtcaagctttccgttcggcgtaagcggcagttcatcaagtatgacaaatgcagacggaatcatatagtcgggcagtgtctcaccaacgaagcggcgaagctcggcaggatcaaggctttctcccgaagcgggaacggcatacgcgaataaacgcgggtcaccgggctggtcttcacgaacgatagcagcagcttgtttaacaaccggatgatttgcaagcaccgcttctatttctcccatttcaattcggaacccccgaattttgacttgatggtctgcacggccgatataatcaagcgacccgtcttcgcgccagcgcacgatgtcgcctgtccggtacatccgcgatccaggcggcccgtatggattcgcaataaagcgctcagccgtgagagcatgtcggttcaagtagccgcgcgctacccctgttcctgccacataaagttctccagccgttcccggaggcactggctgtaatccggcgtccaggacataaagctgcgtattccaaatcgcacagccgattcccggaggttccgtacagttgccttccagcgcagcggctgtagaccaaattgttgtttccgtcggtccataaaggttcgttaaagaacacgcgagctgctgcaattgccgggccaggctggattgcaaagcttcgccgccgacaagcgcacgaagacctttgagcttttccggggcgctcgaggccaatgcatgccagagggtcggtgtagcctgcattattgtaatttcgtatgtttcaatcattttggccaattcggacggatcttgtaccgtttccttctcggcaagaacgactgctgatccgctgatcagcggcaaataaatttcgagtgctgagatgtcgaatgcaattgtagtgacggccagcagccggtcatcttgattaagcgcgaacatgtcctgcattgacagcaaaaaattgaataagctttcagcttgtacgaccacgcctttaggtctgccggttgatcccgacgtataaatcatatatgccggctggttgccggaatgctgttcgccgggattttcttcagaacagccggacattttctccataacagtttgttcatcgaggattaacttcggcatttgcgaaccgatcgtgtcttgcgcttccttgctggtcataacaagcagcggctgtgcatcgttgagcatatactcgatcctgtcagccggataatcgggatctataggtaaataagccgctccagctttgagaacggcgagcatgctgacaaccatttccgctgaccgcggcaacgccaaggcaataaatgtctcgggtttcgccccctgatcgatcagcaagtgagccagttgattagccttttgatttaattcggaataagtgagaaccttatcattgcaaacgactgccggagattcaggacactcctttgccatcctttcaaatcgctgcggaagactctctttgggaagcccgtgttctgtttgattccattcaatcaatatttgagcgcgttcttcagggagaagaatgtccaacgtccccaccggctgagtttgttcgcaaacggcaatcgttttcagaagagtaagaaaacgattgccgtgatcttcaagttcatccgcatgataaacagcagggtttgcatccatgtttacttttagcccgccaccgtccggacggccgtaaatgttgattgacaaatcgtccacaggtcccgtggcaagattatgcacgatgccttgacagccggcaaaattcaagcggttctcaaaaggcatcaaattaagctgcggaccgaacagccgctggttttcgccaagcagcttgagatcccggcgcaattcttcgtggcggtaatgctgatggcgccgcagcttcatcatctcacccgagatttgcttgactagctctcctatgctcatttgcggctgcatgccaattcgaagcgggaggagattcatgaccattcccggaatatgaagagcggctgacccgaggcggcacatcatcggcatcccgagaacgacgtcatttgcccctgtcagacggtgaacatatattgctgctgctgccatcacggtttcgtgccaagttgcccccattctgctcgcggcagacagaagacgatcagcatcctcacttggcaggtgttcagacctgcgaagaaaacttgaagaggtacgcggcgccctttcggcaaggctgaccacctccggttcatcgctgaaacgcccaagccaaaatcgccgatcttcctgatactgttctgatgcacggtaagccgtttcctccgcgataatcaaatcgagggagccaaaggctccgctctggtcgatcgatttgttctgcatcaatgcggtatatatttttgacagccgctcggcgatcaatgtaaagctgaacccgtctgttgcgatatggtgagttcgctgataccagaagtaatgatcttgcgccgctttaaaaagcgcttctgtaaaaagcgggccgcgagtcagatcaaccggacgggcaaggtcatccatcatccagcttttagccgcctgttccggatcggtttctgatctgacatcaatgtaatgtagcggaaaatctgttgacggaacgatctcttgccatggtccgtcttgatcttctccaaatctggcatgaaatgattcagcttctttaatgacatggcgcagcgctttttcgaaaagctcctgatcaagcgggcctttaatttcaacgtattcagctgtattgtagatcggattttccggatcaagctgctgagcaaaccaaatgccggcttgcgctcctgataatggctttcggttatgttgacattcaggcatttaggtgacctccttcattgatagtctgcatttggcaaaggtgcttctttagaggaggacaacagtctccaccagttttcaatcgaagggtcctccgcaagctctacaaacgacacctcccgccccgctcggcgccagcgctctgcgagactcatgattctcacggaatcaattccccggtagatcaaattttcgctgtcgcttatcttttccggcgattcaagaagaagcgatgccacctgttcgcgaatagtctgttttgtcagtgcatgagagctttcttttgcgtgttcatggctttcgccatctttcagtcggctcagaagctgttccgcagtaattgtgacactgcaacggtcagctgcgtatgtgatggccatttcatgatgctttaatgagaaatccgccaccgcatctccgacaaaaaatgtttcaatatcttgcataaaagcatcacatgccgtcatcaggcagccgatatgggcatagattccggtgattatgagctgatcccgcccctgctcctccagcacgcctaaaaggttggtttttctgaaggcattgtacctccacttggtcaaaacaatgtcgccttcattcggtttcagctcatccacgatcttctgctcatcgggatcaggaccgattccgggtccccaaaagtcttggagaagcccccgttcttccggtgtctgggcgccgggttgagccgtgaaaataaccggcatgccgagctcggcacatcgcttccgaagcttcttgatattagccagcagatctgtgaccggagactcgccgtaacggtaagcgttgagaaaatattgctgcatatcgtggatcagaagcgccgcacgcttcggatgaggagtccatgacaccttgtttttcggcatatttgatgcttctggcatttggtacggtaagatggcaggaatggccatcaaatcacatcctctcattttttatcatctgacattctcagctgcagacattttttcagcaatcgccgcacgcagctcttttttgctgacttttcctacgcctgtctgcgggaaatcttcaaccatttctacccggtcgggtattttgtaggctgcaaggcccctttctctcaaaaacgattgcaactcagcctgagccggtgcagcgccgcgagggataatatatgcacacgccctttcgccgagaaattgatccggcatcgagacaaccgccgcatcgagtacccccggatgtgcgagcagatggttttccacttcttccgcggcaaccttctcaccgcctctgttgatctggtctttagctcgtccttcaacaatcaaatagcctgatgaattgactttaaccaagtctcccgtacggtaaaacccgtcttcagtgaacgctttggcattgtgctcctcagctttgtaatagccgcgaatcgtatatggacctcttgtcagcagctctcctgtctgtccgggtccaagttcgcgtcctttttcgtccacaattttaatctcgtcaaacggagacattggcctgccttgtgtgtgaacgatcgtgtcttcaggatcatcaagtctggtatagttgaccagaccttctgccatgccataaacctgctgcagtttgcagccaaacaccgatgaaacgcgtctggcagcttcggcgctgaatttcgctccgccgacttgaaggacctggaggcttgacaagtcgtcccggcgcgccgaagcagcatcaagccagattaacgcaagcggcggtacgagtcccgtgatcgttaccctctccttatcgatcagagggaaggtttcatccgggctgcctcctgatgcaaggacgactcggcctcccgcgtacagcgtaccgagcactcccggcgagctgagcggataattgtgagcgatcggaagagccgcaagatatacgctgttgtgatcgagcctgcaaatctctgcgctgaccctcaagctgtatatataatcatcatgcgtcctcgggatcagcttggacagacctgtgcttccccccgacaactgaagaaaggcgacatcttctggatagacgttttgcggaggtgccggctgatcataaaggcttgccagcgcttcaaactcctccggttccccggcgacaatgacatgacggagcccttgcagcttctcctttacctgtctcgccagcttgcggtagtcaaactttgcgtgacgatcgggaataatgtaggcagcagcttcagaaaactcgcaaaaatacgtgatctcgctatgccgatgcgatggaagcgcaaaaacaggcagagctccgatccggaagagcgcaaagcaaacttcaaaaaactcgatgatattcggcagctggacaacgacgcgatcattttttttgatccccagctttaaaagaccgccagccaaagaatcggctctcctgtctaactcacgatagcttaaatggatatctccgtatgtaagggcaatgcggcttccgtatttttcggcccgctccctcagcatttttccaaaagtttcgcctcgccagcatccctccttccgatatttatccgcaaactccttcggccatgtcgtgcatcctttcagcatctctatccctccgttactcactgttcattcccatcgcaagaagcattgtccgaaactttgcagacgtttcggcaagttcgtcttcaggcttcgacccggcgacaattccggcacctgcgtacagtcgaagcgcgtgttcctccgcctcggcacagcgaatcgttacaacccattctccgtcaccgtccgcgtcgcaccagccgaccatacctgtgaaaaacccgcggtcaaacggctcaatctgtttaatcgcttctttcgccgcattcgtcggcgtgccgcagacagcgggcgtcggatgaagggcggcggcaagctccaatgatgatacagagaggtctgtaagctctcccttcaattccgttgaaagatgccacatcgtcggcgtgctgatgagcgacggttccggcacctccagcttccggcaaaacggcctgagcgcggaagcaaccgcttcgacaacgaccgcatgttcgtgacggtctttaggcgaagcaagcagttcagccgcccgtcttcgatcttcttcgggatcatcgctccgaggtcttgaacctgctaaaggatttgccgtaacgcagaacccggaccgtgatacaagcagttcgggactcgcgcctatcaaagtggtgcgaggcgcttcagatgactgcccggttaaatcaacggcaaagttgtacccgcttgtattgcggcgggcaagatttcgcagcaattgaccgatatcgactttgatcggcgaggtcagctgcaatgaccgggaaaggacgatcttgctgtattctcctgctgctatacctgccaatccttgtctgactccggccatatacgcttccgggcttggaatctgctggacatcataggggtgcagggcaggttcaggcacctctttatcgtcttcttcacatgtcagcggccccgcatgccacgcttcgaccggcacggttaactgcgccggctttgcatcgtcaaatggcacagctccaactacaatcggattttcctgcccgttctccctggcttttttcagaacttccgcagtccgctgagcaaggctttgctcttcggtttgagaaacagaagcaaaaacaccttccgccagaatggtccgctcaggggaagagaaaaagaatgaagcaccggcctgatattcctttaacagatgatctgcaagcgcttctgacacgacatgacgttctatcatcatcaaaacctcctttagattgaatcaggctccaagcgttgctccgccatcgacgcgcaaatcgtgcatcgtaatatgacgagccccgtcagacagcaaaaatactacagcatctgcaatgtcagccggcgaagccaattttccgagcgggattcccgttttgaatgtttcaagtgatccttcaatgacgccttgcgcagcttcctcacactgccatagcgaccgctgcatcggggtatccgttgatccgggcgatatgatattgcagcggatattgtactcggcaagttcaaggccgaggcatttcgtaaacattaaagcggccgccttggaggccgcgtaggcggccatgtgcatccgcggcacagctgccgcatttgatccgacagtcacgatcgctccagtcctgcgcggtaccatccggcgggcgacggcacgcgatacgttaaaaaccccggtggagttgacattgaacgtcttctcccaatcttcatcactcaacgaatggatcagacccgttctgagcacgccggctacattgacaagcatgtctatcggaccgatctcgcgttcaatatcggcgataagctggtcaactgcggcactgtcgcccacatccgcggcaaaacctgaaccctgcagtcctttttgttcaagttcgtcttcaagttcaagcagcccttttcgattttgatcagccgctgcaacaaacaccccgcgtccagcaagcgccagggccacttctttgccgattccttgcgaagccccagtcaccaaagcaaccttgcctttcacttttatcatttcctttcttaaagccggcagcgcccgagtctcaaaaagtcactgccggctaaaattccaattgataatgataatcattatcgtttaaaaatataatataccaataactgctaacggtcaaatcgttttcgaatgtttatccgtatcaatgcgcttggtatattatcagttatctattctcatgctttttcaaagctcggggcgccggaagcgccccgctatcaatcaggcttgaaggcaaaccgcagcgctctgctgattaacacaggcagaaccgatatatgaccttcccctttaaattcatggtactccgcgcgaaccccctgactttccaaagcggccaagcggtcggccagcctttttgcattgtcgttcatcccgcttttatgcgtcttttcgagttctccggccccaagcaatacctttacatcgccatcagcttcctgcaacttcgaaacaaagtcatgctctttatcaaaaaatgacggatgccaatggatggacggactgccggcgatatatgtctgaaatagatccggttttgtaaacagggtctgcaggacaaaaagtccgcctagggaatgaccgaaaatcgcctgccttttcacatcaatcgtgaattcctgttcgatctccggctttaactgctgttcgatgaaggacagaaaagctttcgccccgcctggttccggccagtctgctccatcgggcctcatgggcagctcagcgcccgattccggcagagtaaaatcataataccgcccccggtcaaagggagcgtcggtctcgtaaccgatgccgacaataacagccgtccctacaccggttttatcgggacggcgcgactgcatccgcaacgcctccaccatcgttccaaacacggaattggcatcaagcagataaatcacgggatatcctgcgggcggctgttccccaaatggtttcgcaataaaaatccgatatgtgcggctcccatccagtgaacgcatgcaccgctgttctgtccccggtatcgcaaccgggatgcattcagcagcattgacagactgctgaagtttttcttgagccatatcattctcccttcccctctttgatgagctaaaaaacagtctaatgaacagtctttttttgtttgaaaagtaaaaataagaagtacggcacaccgaaaatggcgataatgatacccgcaggcacctcggacggctggaacagcagctttccggcaaaatcggcgcacaatacgagaaacatcccgatcaatccgcttaacagcaatgagtggcggtgcaggacgccggcgagcctccgcgagatgtgcggagcaatcaggccgacaaatgccaagctccccgaaatagccacacaggcgctgataatgccgacacaagccgtgagcagcaccaccttttcaatattcgcggatacgccgagactcttcaccgtatcttcatgaaagcgaatggtatcgagcaggccggacttcatcagcagaaatggaataagaacaagcagccacggcagtgccgcttgaatatacgtccaattcgccgaccagatgcttccgtttttccaaaccatggccatttcgtggtcattcggattcatcttcaatgacaggtaaagcgaaacagcgctgaaccctgaattaatcgcgattccaacgagaataatcctgcccgaatccaagttgccggcgtgccaggcaaagataaaaatgaatattgcagccaaaatgcccccgatcaagccgaagaatggcatccccattgcagcgagcaggcttgtcgtttcggtctggccttgaaagatcagcatgtagccgacgatcgccgcccccgcacctgcattaatccccaggattcccgggtcggccagtccgttccttgtcatcgcctggatgacggaaccggcaatgccgagcccaagacccacgagtgccgccgtcacaatccttggaagacgcagctcaaacaggagaatggcgtattgctcattcgggttgatgtgaagcaatgttgataacagctcagccggatgtacggcaaacgatcctactgttatgctgagataacagattgtgagaatcagcacaataaaaacagcatagatgactgcaacctttttaggcacgctgctcccctccttttctcttgatcaaataaaggaagaaaggaacgccgatcaccgaagtaacgacttcaatcggtgtctcaaacggatagttgatcagccggctgagaagatcggccagcgtcaaaaaaacgccgccgagaacgcaggagcacgggatcagccggctgtaatccgatccgacgagaaaacgcgtaatgtgcggcacgaccagtccgacaaaagcaatttttcccgccatggcgacagagcagcctgtcagaacgacgaccgctgccatcgctgtccatttgacggcctgctttttctggccgaggctttcggaaatgtcatcgcccaatgataaagctgtcacttttttgctgagagagagcgccagaatgatgccgatcacaaaaaacggcacggcatacttcagcagctcgggattcaattgatgcagcctcgcgctgtaccagaagctgacgtcctgggaaatttgaaagtaaatcgatatcgccgcagacagactgctgagcagcatgcttgttaccgtcccgattatggcaagttgaaccggcataaaaccgtttggaatcaccgaggcgaggccgaagacaaggccggcgccgacggctgatccgataaacgaatagcccatcatctccagagaggatgaacccggaatcaccaccatcaacagcgtgatcacaaacgctgacccgtcggaaacgcccataatcgacggggaagccaagtaatttcgggtgacaccctgcataagcgcaccggacaccgccagcgccgctccgattaaaagagcgccgacagcgcgcggaagacgggaatgccaaatgatttgatgatctgtgttgcctgtatcaaaatgcagcagcgccgaaaaaatcacctcgggctcaagctgttttgcaccgtaacataccgacagaaaaacagacagcagtatggcaaacggagcggcgatcataatgatgcgggtcatttgctttgaatgcatagctcaatgaaccttttctatttgttctgcgccaatttctcagctgcagcctttaaaaattcaaccttgctccatgccgttccgccctgcgcaagcgggtctacagcattgacaaatacacggtcatttttcactgcagaaatgcttttccaaattggatttttctctagatctttcagcgcattcggattgtcggcattctcatcgtctgagaattggacaaacatatagtccggattcatttcactcagtttttctaaagaaaccaactcctgggcttttgccgccttgacttcttttggagctgtgaagccgagctcaccgtataatgtggaattgaagaatacgtcttccggatagataaagatattgccttttctgattctgacaacgagcgcttttgtatcttttgccgttttctcaagctttgttttagcttccttgaggtcggcttcataatccgaaataatctgcttcgctttatcttctttgcctgtcagttcagccagcagctttaaattgtctttccagtttgaagaaacatgggaaacaggaatcgtcgtcgcgatgttatccagttttttcaccactttatcaggaaatttcgttgaagccaggatgacatccggtttcagctcaaggattttctccaggttcggctccattttttcgccgacagcggttgctttgtcagtaatgctcttaaacagatccgggaactttccggagaaggaaatggcaccggctgggtgaacatccagaagcttggcatcttccatcgattccacgcttcccgtaatgacgatttgttcggccgggatcttcaccttgtatgtatgatcgaggtactcgatgctcttctcagctgacgctgtgctcttgccatcgccgccagccttttctttgctgttcccgcatcccgctgcgccaagcgcgagaaggagaataaatagaaatattgatatttttctcatctgactgagaccccctgatttaattgataactattatcaattaaaattataggtaagcctcttcgataacaccatggataatatccggcaattaaaatggattttttccggacagcagccgaaccgcctggcggatgattcgttcatggctgcatgcggaatattcccgccaaggatcagaattcacctgatacacccggtgatgccgcaccgctttcaaatcctgccaagcagccgactgctgaagctccctgtagaatgccagcgtctccggctctttaaaaatgaaaatcataatgatatccggctgataggctgcgattgtttcgatcgacacggcccggtcagtcggttcttccagcgacacagccgattcaaagccaaggtcgccgaaaaatacatcttgaacagaacggttatgcgccagataaatctcgtgtttatgcaagcgcaaaaacaaaaagcttcggcgtccgcagatcggataaagcgcctctttcgcggtctcggtgagacgctggtaagacagcagccatttgtgagcctccgcttcttcgtccaaatgggatgcggtcagcataaaatgcctcctccattgttcctgtgaaggcaaaaagaagacatccgcgatcgactggagctgttcccgctcctcgtgagacacgctgtccatgctgataatgagctccgggtcagccgatgacaatgtccacaggttttcttcccacggctcgtgaaagcggtatgcgctcagatggaccggaatatctgccgcgtaatgcttatagtaatatgatgtccacttcggatgcagggaagcggcgtaaggaatgaggtgaagcggtatcagctgtccgatcgtgttctggccgtaggcagccagctttctgcgcctttttttcatataaacggtcggggataagcctgtatgcttcttaaacgtcctgctgaaataaaattcatcctgatatccgatttggcttgaaatttccctcagcttgtagctcgcttttgccatcagctgcttcgctttcgtcatccgcgtctcagtgataaactctgtcacgctttgaccgtacagctttttgaacgtttcgctgtagtgcttcgcgctgattccggccatttgcgcgagttgatcaagcgtcaggtgtgcatctgaatgctcctcaatatactcctttgtttttcctatggctgatgcggtgttttcgggatgagtcagtttggccgaatagatatcgtacagaagctgctgcagatctgcttggcatttcagctcctggagcgctgaagatgccggccataaggcggaaagttcctgaagacgggaggccagatttccgacaggatggacattcatcatctgaaggtcggaaaaagcgtcagggtcggtgtctgcttgaagcgtcaggcggcggtcttcatagcagtagggctgcagcctgatgagataaacgctgatttcctctgacgaagctgtgattccgaatgtttcataaggcggaacgatatacagcgtttctttttggaggggtctgcctgatgcttgtatatcgattctgccttcacccttcaaatgaaagatcaaaacgaaagagtctgcgagctgctgttcatccggaagatcgccgggctttcttatatgatcaatttgcaagagacgatagaaataagaagatttcatagaaaaaccgcctttcttaacccagtgatattacaaaaaataaaaatgcccctaaaacaatatggtaaattggttgcggggtgcttgtccggcacaaaataccagtttgcaaggtgcatttcacatcacttatagctgatatgcttcttacgatttactataacacagtcacttttattgtggaataatgtatccaaagagaccatctgcccaatcctgactttaaaatataataaaaaatcaatacttatcatttcaatatccttttacctagtgtataactatagagaaattactatatttacagggaaggcgtgacttcttattttggaaatgacagacagcatgaaaaaatcgcttgatgcgattgcaaaatggggaaaaataaccggagtttttatgattatcgccggaggcatctatgcctttttcggaatttctttgcttatcatcggagccgctccaggtgtgctgatgattttttcaggaatctatcttcttaaatcggcaaacgccgctcagaaaatgagtcatgacatgccgcaagaaccgcatgaagccttgcttgataactatgtgaagtttatgaaatggcaatttttctacttactatcgaatattgtgatcttcattttatgcataatcgtttttttcttcctgatctttttaggtgttctagccgattcttacagcgggtatgatccttattattacgaatgatgatcaaaagcctgtctcggatcaatttccgagacaggcttttattattgagcttctccgacaacagtgaaacgctcattgacatgctcgcctttttcagcctcgtccaccactgcaatggcgtagtctgcatagctgatgtagctttctccggcggtgtttacgattaagttttcctgacctttttgataagaacctgttcgctttccttccggattaaaaaatgccgccgggctgatgaacgtccatttcagtccatctgcttctttcaaatcctgaaggttctgcccctgatttttagccgtcggcaagtattctttaggaaactcaggcgtatcgtacagctgggttgttttttcctcatcgacataaaggctgcctgcaccgcctacgacgattaatcttgtttcaggaacctgcttaaacagttcaatcagctttcttccagcttcaacatggagatgctcctgccctggggccgcgccgaatgcattgacgacaacatccagtcctttgatgtctgccgctgtcaggttgaaaatgtctttttcaatgacagctgcatcgctgttcgccatttttgacgcacttctgacaattgccgtcacttcgtgtcctctttctgatgcttcttttaaaatcatgctgcccgctttaccgcttgcaccgataataccgattttcataatcgcttcctccaataatttgattatttgtaacaagatttgttacatgttgatgatgaaacatcatctcttgtttaaaagagatgagttaagacgtctttaagagacttgctggccaattcgttctccatcgcctgctgaacgctgtgaaacgtttgatcaagcgttgtttgaatttgtcttccaaccggacagtttggattcggcttgtcatgaatcgcaaataattcctcatgcggctgaaccgcgcggtaaatatcaagcagagatatatcttcgggatctcttttcaggcttgccccggccactcccggccgcgacgtcagaataccggcttttttgagctggctgatcatgcgcctgattacaaccgggttcgtattaacgctcccggcgatcatttccgaagattcccgcgggtttgcggcgattaaagacaatatatgaatggccactgaaagacgggtgttcaccatatgttttcaccaccgatgtaattattatagttacaggtcacgtttttgtcaactcttatcatatccttaatgatcgcaagaataaataaaaattttttcaaaccctcacgtctcacttcggaactttttcacagtctctttcgtatctactgatgaaaggagtgtttttcaatgaaggagataacagaaggaaaagcagctttggatagccggcttgagccgaatgaagagatcagatctattattctttgcgcttataacgcgagactgtctgcacgttacactccgtacagaggcgtgcttgccgccactgacaggcggttcatgttttattcctccctgtttggctccccttttcatcttgacatccgctatgatgccgtcacctcgtttcgccgcgaaaaagggctggtaacaagaggcgatcatctcgtcgtgatgaacaacggggatcgggaagcatttcaatattttagcggctgtgatcctttagagacattcgtcgaagccgttcgaaagctaaagaaactgcctgaagacatcattcattctgaaaaacgccggctccgggatgtgcccgcagccggctgctcagttattaatatcgtacttctctccatacctcagcactttataaattgccattccatcagaaagatgattttcggaatacctcacgggaatcaaagcaaaaaatacataataggttgaaaaataaacaaattggtagaaaaaaatattttcgggtatgatgtctttgataatcagcagattgataataaatatagacattaagttaaacagcgatccgccagcataaatcatcgcattcgtgaaacggttatcgtattttaaatccccgtatttgcagaaggaatccatgaagtagacacttctgatttgaacagggccgattttcagcaactttttgcccatcccgatttcaagcgaagatttcccgccgaacaacaccgccatggcgctgtggcccaagacatgaagcaccgacacggcaggaaaaacgatcaagaacgaccagaggaatttgacaatatcctgcagtccgaacattcaatcatcctttctgtttcaggcaatgttttttaagaaaatttccgcttttcccccgtatcaaacctgtcaatatgcaaaacaagcagacctcagcatgaaaaaaaccgcccatctactctatggacggccttctcaggagcagtcaattatcctccaatataggacatttcaacctttttccgcggaaccgcttttgcaagagcgcggtcgagagaatattggtcatcgcgattccgccagacggtgccgatcgcctccgccagctcctgatcggtctgcccgcttctgatcaaggttcttaaatcaaacccgcttgatgcgaaaagacatgtgaaaagctcgcctttcgccgatagtcttgctctgttgcatgtggtgcaaaaagcatcggatacagaagagataaaaccgatttctcctgagccgtccaggtatcggtatcgttttgcgacttctccttcgtagttcgggtcgatcggttcaatcggcatatcttcattgatgatccggatgatatccgctttggccaccactgactgacggttccattcatttgtgttcccgacatccataaactcaataaaccgcaaaatatggcctttttctttgaaatagcgggccatcggcaaaatatccttctcattgacccctttctggacgaccatgttgatcttgacgccgagtccggcctttttcgccgcttcaattccggccagcaccttgctgacggaaacgcctcttccgttgatcgatttgaaacgctcatcatccagggaatccaggctgaccgttacacgtttcagccccgcttttttcagcttgtcagcgtaaaccggcagcaaaacgccgttcgttgtcatcgcaatatcgcgaatccctttgatccctgcaagcttcccgactaattccggcatatcttttctcatcagcggctctccgccggtgagacggattttttctaccccgaactgatgaacaaacagcttggccaatcgttcaagctcttcaaaggacaacagttcgccttttggcaaaaacggataatcctgcccaaagatttctgcaggcatgcaatacgtacatcttaagttgcagcggtcggtgacagaaattcttaaatcccgaagcggccggcttttctgatccaaaacttgttcactgttggtgttcacgcctgttgcctccttttatgaaaactgaattcgctcgtgatgcgtgtatacattgaatgaccggtttctcgcaaaaccaatcgtcatgatattcagctcctctgccatctgaatggccagctcggtcggcgccgacttggaaatgaccgcggaaaccccgattttcgcggctttaagcagcacttccgaagaaattctgccgctgaatacgatcagcttatcgcgcacaggaacctgatgaagcaaacaatatccgtacaatttatcaagcgcattatgccttccgatatcagatctgactgcaatcagcttgtctgtgctgcacaaagcggcattatgaacgccccccgtatggtgaaaaagcttgctgcttttctgcatgtcgcgcatcagcttcaaacagttctctggcgtaatggtcacgccgtcaatcgctgtttttgcggttttgacgtcctgctggaaataaaaatgcctcccttttccgcagcaggagccgatcacccgctttgtgtaatccttcagctgcagcttttttgtgctgacaaggtcgacatatgcgaacccgaggctttcatctattgtaaaccttttaatctcatttttaaatcggatcaccccttcagatgcgagaaatccgatcaccagttcttccaggctgtccggcgagcaaacaagcgtgacaaattcctcgccgttcaccatgacagtcagggggaattccgtcgccatctgatcttcttgctgcaccagctctccattatcataacggaaaatttttcggcttgttgtgatgtttttccccatgaataactccgcccctttgtttcttactatatctattactatactcgtctatcatgccgtttcacaaccgtcaggtcaaatttggaagcttcatcttgttgatagcttgaaaacatgatattattttttaaaagttcaaaaaatattcacttttcaaacagactgcccttcttcgcagcaacttcggaaaccgctttcaaacaatcgctccccggcagccttctgtctttattacagcctttttccacagggggttctcacatgaaaaaagcgaaaaacaggtggctcattgctttatgtgctgtaggcattcatttgtcaatcgggtcggtatacgcatggagcgtctttacaaacccgctcgctgaaaccttcggctggagcctcagccagatcagtctgacgttcagcatcgctattttatttctcgggctttcagccgcatttttgggacacttcgtcgaaaaacacggccccaaaaaagcaggcatgctcgccgcacttttcttcggagctggcgtgacgttttccggcttcgccgttcagatcggctcccttcccctgctttatttgttttatggagtcttcggagggatcggactcggcgtcggctatattacacccgtatcttcgcttgttaaatggtttcctgaccgccgcggcttggccacagggcttgccattatgggcttcggatttgcggctttgatcagcagcccgatcatgcaaaagctgatctcagcggtcggtatagccaacaccttttttattctcggcatctgctactttcttgtgatgatgctctcttcgctttacctcgccccgcctgaagaaggctggcagcctgaaggattttcaaccggaaaaagcggaagagcacaaagcgctgatatttcccagctgacggcaaatgaagcgattaaaacgaaacgcttttattatttatggctgatgctttttattaatgttacgtgcggaatcgccatcatatcaatcgcttcaccgctggcgcaggaaagtgcgggcatgtccgccgccgcggccgccgcgctcgtcggcgttttgggcgcatttaacggtttagggcgcatcggctgggcctctgtatctgattacatcggacggccgaatacgtataccgtctttttcgccatacagctgatcgccttcccgcttttgccgttcatttccgacaaggccgccttctctgttttgatggcattgatctatacgtgctatggcggagggtttgccgcaattccggcttatatcggggatttgttcggaacaaagcagctcggtgcgatccacggatacattttaacggcttgggcggcggcagggcttgcaggcccgatgttctcttcttgggtacgcgatgcaacagggagctacagccaaagcctgacggtgtttgcggcactgttcgccatcgccctgttcatttcgatattcattagaacggacattaaacagttgcggaaaaaagcggcggttcatgtctcaaactcgctaaaaggatgatctgcagtatccgctggaaaggagagaagggaatgggaaaaacaaagcatcaaggtccgatgaagctgaataaaaagcccgcgccaaaactgtgggcgtcttgggcgccgatgggactcggaaaggtaaagccgaagcatatcagagatacgatgaaaacagcgtgggacaataaagacaaccttccgtacgcctacagaattttgacgcaaggcgtgtgcgacggctgtgcgctcggtgtgtccggactccgcgatcagacgctcacaggccctcatttatgcacgacgcggctgaacgtcctgcgcttaaatacaatgcctgcgatcgaggacaaatggctgtccgccgacatcgaacagctgcgaaagctggacagcaccgagctgagaaagcttggacgcatcccctatccgctgtcgagaaaaaatggtgaacgatcgttctcgagaatttcgtgggatgaagcgctcagccgaatcgcggacaaaatcaaatcgattgataaacggcagctcgccttttatttaacagccagaggcataacgaatgaggtgtactatacggccgcaaaagcggcgcggtttatcggcacaaacaacattgacaacgcctcgcggatctgccactcgccaagcaaaacggctttaaaaaggtcccttggcatcggcgcctcaagctgcagctaccgagactggatcggaacggatgtcctcgtcttctgggggtctgtcgctgccaataatcagccggtgtcaacaaaatacatgtatgccgccaaaaaagcgggaacgaaaatcattatgatcaatccgtaccgggagccatcgatggagaaatactggattccatcgatacctgagagcgcccttttcggcaccaaaatcaccgatgatgtttaccaagtcaatatcggcggcgacattgcctttatgaacggggtgatgaagcactggtttgaaatggagcgggaggcaccaggttcaagcattgaccgcgcctttatcgatgcacacacaaacgggttcactgagcttaaacagcacatcgaaaaacaaaattggaagacgcttgaagagtcatccggcatatcaaaagagagaatgaaagaattcgccgtcttgctggcccgggcgaaaaccggcgttttcatttggagcatggggcttacacagcaccgttttgcgaccgacaacatttcacaggtggcaaatctcgcccttttacaaggattcatcggcagaaagcattgcggcgttatgccgatcagagggcacagcggtgtgcagggctctggagaaatgggtgccgatcctttcgtcctcccaggcggtgattttgacgaggaaaatgccgcacggatcgagaaggtttggggcttccgcttaccgacttggcaaggcgatacgatcggccagacgatcgaaaacatgctgctgccgagcggaagcgaaagaaaagtaaaagtgttttatacaagcggaggaaactttttggagacgatgccgaaccctgattttatcaaaaaagcattgcaggaagttgaagtgagagtccatcaggacatcatcttcaatacctctaccctggtcgatgccaaagaggaagtcatcattctccctgcgatgacaaggtatgaacagcctggcggaggaacctcgaccagtacggaacggatggtatacttcagccccgaaattaaaggaccgcgcatcggagaagctcgttcagaatgggaaatttatgtagatctcgccaaacgggtccggcccgaagacaaagaactgatccattttgacggcgctgcggaaatccgtgaagaaatcgctgctgccaaccggaattatgacgggattcagcatttaaaaaaacgcggagatgtctttcaatggggcggcgcctggctttgtgaaggcggtgtttgtccgacggcagacggcaggggcaacctgatccctgtcgatcttcctgaaaacagacaaacggaaggacgctttctcgttacgacaaggcgcggaaaacagttcaactcgatgatttatagtgaaaaagatcctttcaacgctgcagatcgccgggatgtcatgatcaatccaaaagatgccgaggagctttatattcaagatggagaagcgatcgttctattcaaccgctacggaactttccaagggcgggcaaaatatgccggcgtacaacgcggaaacacggcagtctactggccggaaggaaatgtgctgatccctaaaggcgtatacgaaaaccatgcccgtattccggaatacaacacggcggtcatgattgaaaaggcggagattttccattcgagaaaagatccgcgctatgcagaaaaacgaatcgaagaactcgaaatgtcgaccgattagcttaacagtcgggacggctctgctgccgtcccgttctcgtatggagttactgagacagttttacgccttcttctttccatacctttttaaaatcagaagctgagtcggcttcaatcaattttccgccgccggcgtcagctacttttttaagctttgctttttctttcacggtttttacatccagcccaacaatgttgacgatcgttttaatgttggatttgcgcagatcttttgctgcctgaacaggatcccctccgcatgtttcttcaccgtctgtcacgatgtagacataattcttcccatctttatcggcaagatcatcttttacatcataaagagattttgcaatcggagaccagcctgtaggcttgattccgcttaaagcgttttcgaatgaattgaaagaaaacggctgcagatcatagacggtttcagtcgtaccgcaggatacttcttttcctgagtttttattgttgcctttatgtccgaaaacattcagcatgacattcgcatcgcttgaaagcaggtcggcaaaatcggttacggattctttggcaatatcaaattttctttctccttcaaccttttgtgccatgctgccgcttgcgtcaagcacaactgcaacattgacatcttttttgctgttgtccgcatttccgttttcagccgcaaaagctgctgccggcgccaatgacaaaagcatggtgaacgttgtcaacagagcaaacctctttttcaactttctcactttcctttccgcatttgttttttcggaccgatcttccgcatgagatcaagtccaccaacatcgtaaaagaaggcttgatagaaataaataggccggatctccttttcaaattcacaaattcttcataatccttacaataatcgatcgacgcattcacttaagacctatcaaaaaagtctgctaaaaggccgatttcatcccaataaagctaccgttacgacaaataacccctccaaaggacgcagcagggttcaacgctctgacacaataacttaatatttgtaaagtatttttcttgacttttgacaatcttttcctcacaaaaggaaagctgcggaaacatgtccacagcttttttccagtttatttagaaagctcaattgcttcctgagtaaaaattcttttgatgtcatttttagtttttgcctggaaatattcaccgccgccagctgctgcgatactggtcaattgtccgtggaagtctccttcataatcaaagccgatcacgttgacaactgcattggatttgcgcagttctgttgcgacttttaccggattgcctccgcatgtttcctcaccgtctgtcagcagatagacgacgtttttcccgttgttgtccagctggtcaagcgcgttttttgcatcttgcagcgcgtttgcgattggtgtccatccggtcggtccgatgccgtttaaggaattgcggaagctttgctcgtcatacgtttggaagccgtacacccctctgattgcattgcaggactgcacttttccggaatttttattgtttccctctgaaccgaaaactctcatgagcacgtttgcattttcaagcttggaaccaaagctgaacgcttcatttttggcaagctcgtattttgagaccccgccgatctttttagccatgctgccgcttgcatcaagcataatcgcaacgttgggcgcatcttcggcaactgttacctcctgttttttctcagctgcaaaagcaggcgaaccaagactgagaaccatagcggtcaaaatgcccaatgtcatcttcttcttcatttctccctttcccctttctgaaataaagtcgttaacacattattatcgtagaagaacaccagggagaaataaatagggcatgtctccttttcctcgttattcaattcatcatacaacaagtatataaaatagactttataacctgtgacccctattgttgatacggcgtttgcggccttttgacgctgttcagcaagccctccggcacatgtttttagaaatatttgtataataatttagcgtgcatcaaattcatgggaatgccaaatttcgatgatattcaaaaagacgccgccaagaggcagacgtcttttgttttattttttcgccatgtatttatttaaaaattcatctgcattggatacggctgttcctttgtaataatacttgacgatgtcttctgctttcttgccgtctttcgccatataatgcgcaccgtattggctcattcccactccatgtccaaatccccttgtcgtgactgtaatctgattcccgtcgcgtttccaatcaaagtctgccgatttgaggccgagcttttcgcgaatatctcttccctcaagcttctttccattgatgacggcagtcgctacgcgttttcccggcgttctttcggtgatctctccgatgctgtttgaaccgggcagcttgacaccgagcttttgttcaaattcagcgacagtaaacgttttatggttcaggaatttcggcgattttgtgtcccaggagcttttcacgctttgcaggtacggaatatcacttgtccaataagctccggcattctcggtgtacccgttgctcgtcgagaagaacgaagcatcaataggcttatgctcataggttaaaattttgccttgcgtactggctacagcttcggtcacctttttgattttccaatcgtaatccttcttccacagcctgcggagctcctctttgtttttatacacctggaacatctgcgtatcatcgaccagcgagcctttcggcgactgtacagcttgctctgacaccatttgcctcacaatgtatgtgcgggctgccagcgcttgtgcttttaaagcttcgatatcaaaatctgccggcatttccgaggcaacgacaccgatgacatactcttcaagcggaatgtcttcaactttccggtcagccgttctgtagaccggaattgaaacgggagactcttttaaggtgactttctttttttcctcgtgttgctgagcgtgtttctctgttttaattgcccccggtcccccgtgaaaagggaggacaagcagtgttggtatgagtaaaatcagcgtgcagattcctgctagtacaattatgagctgtttcaaatcagtgcccccatttctgttttgtctctttcattttatgggcggggacaagctaatatgactgtactttttcaactgctgctacgtattttaaaagcaattcttgtgcataatgatagatatgggaggcatactgatatagaatacttgaaacgcaaaaatcagtatgccgtatgacatactgatttcaggttgatttatgcatttaaatcggatacaacttctttattttcaatatgaactgcttcttcatcgttaacgcgctcaatatcagcgccgagaccggcaagtttttggtggaagttgacatatccacggtctaaatgttttaattcggttacgcgtgtatgaccgtcagcaacaaggccagcaaggataagagctgcgccggcgcgaagatccgttgcggcaacttcagcgccttgaagctgcacaggaccattaatgatgacagaacggccttcgattttaatatctccgttcatacggcggaattcttccgcgtgcatgaagcggttctcaaagacggtttctgtgatcatgctggttccatttgcgcgcatcaaaagagccatcatctgtgactgcatatcagtcgggaaacctggatgtggcattgtttttaaatcaataggcttcaattcagaaggaccgatgatccgaagaccgtctccttcttccaagatttgaacgcccatttcttccattttcgcaattaaagatgttaagtgctcaggaaccgctccctttaccagtacgttcccttcggtaatcgccgcggcaaccatgaacgttcccgcctctatccggtcaggaataatcgtatgttttgccccatgaagcgccttaacgccttcaattttaatggtgcctgtaccggcaccccgaattttaccgcccattgcattgatatagttagccagatcaacgatttcaggctctttagcagcattttcgagagttgtcgtgccctcagccaaagctgcagccataatcaggttttcagttgctccgacactagggaaatcaaggtaaattttcgctccttgaaggcggccttctacagtcgcttcaataaagccgtttccgaccttaatttttgcccccattgcttcaaagcctttcagatgctgatcgatcggtcttgaaccgattgcacatcctccaggcaaagccactctcgaatggcctgtgcgagcaagaagcggacccatcaccaatacggatgcgcgcattttacgaacatattcgaacggagcttccgtagacaaagtgcgagatgcatcaaccgttactgtattattttcaaaatgtacacttgcgcctaaatgacgtaacacttcgttaatcgtatatacatcggagagcgtaggcacatcacatattacgcttttttcttcactggctaataaagatgcagcgataactggtaaaacggcattttttgctccttcaactttgactgtgccgtttaactttcgaccgccgcggacgatgattttttccaaggtattcccctccgcgtcccaatttctctatattaatattcagtcgtgacgattggtgtgccaaccgtgacggtaagtttttcgcccattcccgcatttctaagcgagacttgcaaattcatacggtgtttttctgtcttgatggattctttccactcgttagtgtaagcagaaatagaaacgaaatttggttcaattaaatcttcaactgactttgcatcaaattcatgtactagctcatttgcttttttttgcaaaacaacattcatcataccatttaaatggccctttagacaagtaaaaattgcggtcttttctcgcattatgtcgaatgcatcccgttcaaactgcttatatgtagcattccagttttcccgtggtcccgcgcctttttgctcatacaataaatacgaaacaagtctctggtttttgtgggtggataccaaatgtattttggaattgatatgattttttttgtcctgaaaaacacctgtcgctttaactgtatcgtcgtcttcccgcgttaaagtccattcatattgtcgatgctgtttcttgaaatgtttcagttttgcaaaaaaatctttttcacttagggtaagctgtttttttgtatgcatggtccactcttcaagctcgacatcatggcggctcaaaccttccgccagctgttcaagcggcgtattgcccgctgcttcaagcgattgaaagacatgaacaattaaaaataaaaccacactaaaaataagggcattaaccgtttgttttgtcttcattctgcatcatcctctcctactctccattgttgacggatcgcaggaaaagcatacgtggaaaaacaaggtctccggtgattttgcagaacgcggtgttacccatattcgtccattcccataaattctttttcttttactcaatcatgaaaataaattttgaagctgtctggaataataaagatagtccaagaaaaaattgctgacggtggagccgacggcgattgtaatgatgatcattaacaccctcgcctgaatgacttttcctttcctgataagcggatcaatattgaccgccagaagagcccaccaagtcaatgcaataaaaaaaagatgaacgatgatactgacagcagcctgttgtccgatctcttccattattgatgatgcctccttacgttcagccggtttggtgcttccggccagcctcgtctcttctgccgtaggataaaggaatgttgctggtcatttcaagtcattttaacagttttgatgttgcatgttaagtcgttcatgatagaactttttcccatagatggagtgatcctctgttgcctgaggggcttgtgttttaggagcttacttgaatgtcttacgtcctctttttggtggaagagaacatagcttactattttgtattatagatagattcatactaaaaaggcgaacaatttgtgaacatttttcaacattttcaattctgtttgatcttgaatataaaagacccttcccatccttaaatatgggaaggatccttatctctatctcgcaacatccaaccggttaatcgcgcgttttaaagcaagctctgcccgaataatgtcaacatctggagtttgcttttgcaaacgttcctcggcacgccgttttgcggccaaggcgcgttctttgtcaatttgttcagatgtttccgccgtctgggccagaatggtgacatggtcagggcggacttccactatccccccgctgacggcaaccagctcagtttgaccgtcttttttcagacggactgcagcaatttttagcggagcaaccgtcggaatatggccgggtaaaataccaagctcaccgctctctgctctaacgcttaccatttctatatccgcatcgtatactgggccgtcgggagtaacgatattgacttttaaggtcttcatgcttttaccctcctaggaccagattatacttctacacccatttctttcgctttttcgacaacttcttcgattcggccgacaaggcggaaagcgtcctcaggaaggtgatcatacttaccttcaaggatttctttgaagccttttaccgtttctttgacaggtacgtaagaacctttttgtcctgtaaactgttcagctacgtggaagttttgcgacaggaagaattgtacgcggcgcgcacggctgacgacaagcttatcttcgtctgacaactcatccattccgagcatcgcgatgatatcctgaagctctttgtagcgctgcaggatctgctgaacgctgcgcgccacttcatagtgctcttctccgacgatttcaggcgaaagcgcacgggaagtggatgcaagcggatcgaccgcaggataaatccccatttccgacagcttacgctcaaggttcgtcgtcgcatccaagtgagcgaacgtcgtagccggcgccgggtcagtatagtcatcggcaggaacgtagatcgcctgaatcgatgttacagatccgacatttgttgatgtgatccgttcctgaagctgacccatttcggtcgcaagcgtcggctgataaccaaccgctgacggcatgcgtccaagaagtgcagatacttcagatcctgcttgagtgaatcggaagatgttatcgataaagaacaatacgtcctggccttctttatcacggaaatgctcggccattgtaagtccggtcaaggcaacgcgcatccgcgcaccaggcggctcgttcatctgaccgaagaccattgccgttttgccgataacgccggaatctttcatttcatagtaaaggtcgtttccttcacgcgtacgctcgccgacacctgcgaatacagagataccgccgtgctcttgagcgatgttgttgatcagctcctgaatcaaaacggtttttccaactcccgctcctccgaaaagaccgatctttccgcctttgatatatggagcgagcaagtcgacgactttaatacccgtctctaagatttcaacctctgttgatagctgatcaaattttggagcttctctgtgaatcggatctttggcagcatcagccggaagcggctcatccaaatcgatattttccccgagtacattaaatacgcggccgagtgttacgtttccgaccggaacggagatcggctctcccaggtcgatggcttccattccgcgtgtaacaccgtcagttgaagccattgcaattgtacgaactgaatcatcacccaagtgaagcgctacttcaagggtaagatcgatgtccacttcattctcgttctgcgctttatgtgtaactttaatcgcattatatatttcaggcaagtgaccgtcttcaaaacgaacatctacgaccggccctaatacctggctaacgcgtccttttttcatctctatccctcctgacaaactttttctattctaaagcagctgcaccgccgacaatttccgtaatttcctgcgtgatggatgcctgacgggcacggttgtatgacagttcaagatcggcgataatctcttttgcattgtctgtcgcatttctcatcgccgtcattctcgcagcatgttcgctcgctttgctgtcaagaagcgcgccaaaaatcaagctttccgcatactggggaaggagcacttccagaatctcttcttcatccggttcaaactcaaatgacgtctttttcttgttaggcgcaatatctgtcaaaggcagcagctttttctccgttacctcctgggaaatcgcgctgacaaaatggttgtagaacagatacagttcatcaaaggtttcgtcaatatacatttgcaccgtgctgttcgccaaatctttgatttctgaaaacgtcacttcgtccctgatccccgtcatttcagaaatgacaggaattccgcgctttttaaagaaatcgcgccccattcttccgaccgcgatgaccgcatactcatctttggattgatggcgttcctgaatcctttgatacgctttgcggagtacgtttgcgttgaacgcccccgccaagccgcggtcagctgtgatgacaaggtacccggtccgcttcactgggcggcttgacatcatcgggtgtttgccggtgtatccgactgcgatatcggcaacgacttcctgcattttttccatataaggaacaaacgatttcgctttgttttcagcccggttcagctttgaagcagaaaccatttcctgggctttcgtaatttgactcatttttttatttgaagcaatcctggatttaatatcccgtaatgaggccaaaaggtttcaccacctttttgttttcaaattccttcgcattgacgtgaaaaagagagaaaaagatagcctttttctcactttttattgtttagttgcttggcgcgaacgtacgtttaaagccttcgattgcacccttcatgtcctcatcggcaggaaggtttcctgtctgggcgattgaatcgagcagatctttatgattttggtcaagatacataaagagctcttcttcaaaacgtttgatatcctcaacaggcacatcatcaaggaagcctcttgtcagagcatagagaatcgcaacctgcttttcaacgcgaagcggtttgtgcagatcctgtttaagtacttcaaccgtacgggcaccgcgattcagcttcgcctgtgtcgctttatccaaatctgagccgaattgtgcgaatgcttcaagctcacggtatgatgccaaatcaaggcgcagcgtaccggcaactttcttcatcgctttgatttgcgcggacccgccgacacgggatacagacaatcccgggttgaccgcaggacgcacgccagagaagaacaaatcagactgcaggaagatttgtccgtcagtgatcgaaatgacgtttgtcggaatgtacgccgaaatgtcgcctgcttgcgtttcaacgaacggaagtgccgttaaagatcctccgcctttggcgtcgctcaattttgcagcgcgttcaagcaaacgggagtgaagatagaatacatccccagggaatgcttcacgaccaggaggacggcgaagaagcaaggacagttcacgatatgcggtagcctgttttgaaaggtcgtcatacacaaccagcacgtgcttgccgttgtacatgaattcctctcccatcgcaacccctgcatacggcgcgaggtacaatagaggggcaggctgtgaagcggaagccgtcacaacgatcgtatagtcaagggcgccgtgtttgcgaagcgtttcgacaacgccgcggactgtcgattctttctgaccgatcgcgacatagatacaaatcatatcctggtctttctgattcagaattgtatcgatcgcaatcgacgttttacccgtttgacggtcaccgataatcagctcacgctggccgcggccgatcggaattaaagcatcgattgatttgatccccgtttgaagcggctcgtgtacggatttacgatccataactccaggagccgggctttcgatcggacgggttttgcttgtgagaaccgggcccattccgtcaacaggctggccgagcgggttgacaacgcggccgagcagctcttcgccgacagggacttccatgatccggccggttcttttaacttcgtcaccttcacggatgtctttgtaaggtcccaaaataacgatacctacatttgattcttcaaggttctgagctaagcccagcacaccgtttgaaaattcgacaagctcacctgccatacagttatcaaggccgtgcacgcgtgcgataccgtcaccgacctgaattaccgtacctacgtcgtgaacttctatttcagactgatagttttcaatttgctgttttatgagagtgctaatttcttcagctttgatgctcacttaggtttcaccccttctttcgattttcgcctgctaattgacgttctatccggtcaagctttcctcttacactgccgtcataaatgcggttcccgatgcggattttcacaccgccgatcagatccggattcacttcgtttctgacgcgcagtgaagcggcgcctgcttcttttgcaaacacttgagaaaaagaggaaatttcctcttcgctgagcggttttacagagtatacgatcgcatcttccgtcccgcggaaccggttcgccattttgacatattcgtccgcgagatccgggacgattgacgtgcggctgcggtcaacgagaagataaagcgtatgtaagactgcagtcgaaacggatccgaacgagtcttttaaaatctgctttttcttttcagcgggcactttaggatgacccagaacggcattgaggtctttatgctcaataaatatcttcttaacgacggtcagctcttcttctatttcattgaccagcttggattcaagggcaatgtcaaacagagcggctgcgtagcgtttggagacagctgattggctcatcggctttctcctacttctttaagatagtcttggatcaatttttcctgggcttgttcgtccagctctttttcgattactttagaagcgatcatcacagacaatgatgcaacctgctcgcgcagcgcggtgacagcctggtctctttctttgacgatctcgcttctggctgattctttcatgcgttctgcttcctggcgcgcagccttgatgatttcatccttttgctgttcacccagttttttcgcgttttcaatcagagactgggattcttcgcgtgcttctttcaaaagcgcctgctgctcctcaatgagcttcttcgcttcttcattctttttctcggcagaggagatctctccggtaatgtagtcttcacgctctttcattatatttaatagcggccctaaagcgtatttcttcaagagcgctaacaaaatcagcatggcaacaagctggaacagcattgttccggcgttaaaccctactcctgcacccataacctgtggtaaaaaagacatcgaatacggcaactcccttcttgcagattatctctccgaggccatcgaaaaatgttctccctcttttttcaggagggtgattcttccggccgttatgacagttcaagcaaccataaagcaatggcgaaggcctcttgcagtgatcttcgccatttaccagttttatattcgcttttagctgaagaacgctaagaacgcgataacaacagcgataatcggaagggcctcaaccaatgctaccccgatgaacataagggttctcaattcttttccagcctcaggctgacgagcgattccttctactgtacgcgatacgataagtccgttaccaatacctgcaccaagtgcacctaatccaattgcgattgcagctgctattaaactcatgaaaaagttcctcctttaaattgttatccttagcggatatgtcttatttttagtgttcatgacttactttgtgagacatgtaaaccattgttaacatcgtgaagatgaatgcctggattgtacctacgaacaagctgaacgcctgccatacgatcatcggcacaaccgctccaatggttccaaccagccccaggaaaatgctttgagaatagaagttggttgccagtccggcaagaaggccgagcagaatttcgccggcgaaaatattaccgtaaagacgcaatcccaatgttaatgtgttcgcaaattcttcaatgattttgagcggcactaaatatggaattggtctgaagaaatctttggtatactcccccaaccctttccttttcactccgtagtaatgagtgaggcctactaccatgacggcgagggttaaagtaaccgccggatcggccgtaggggatttccaccataattcgtggcctactgttatggaaaacggaaggccgagcatgttggcaacaaatatgtacatcagcagggttatgccaagggcgagaaagtctctgccgactttaagatccattgtgctgccgataatattgcgaacaaagtcgacaatccactccataaagttctgagctttcgtcggccggatcgcgagtgttcttgtggtcagcaccgctatcagaaagacgatgatgcttgtcacagtaatcattagaatgctagttaaatcaaaattgaggcctaagaaattaacaattctagattcgtgattcaaagggttttcacctctcttccattgatgaacgttttagctggataaaggaatctatcataatgacaggataaattgtcatcaaccccacaatgacgcctgccaaatgaatatattcagggtatttataagcaatggccgccgcgataatggcgttgcacaatctggaagcagtcccgagagaacggatcattttgccctttgccactgctttatcgaaggcctgcatccttttggccagcagccagagattgaaatagctgaaaacagtgccggtaatcaggcctaaaaaaattgcctgatatggcagaaatccatagcctaacacgcagactgctaaaatatataggacatatttttgttgcctacggaatgaaagactcgcatcggtcatcaaatacgctcctgatgtgaaaattttaaatctatcttacgattacggtaaactaggcggtctgaccattttacagaacgtagtgttctgctcaagacttcacacagtccgaaaattcttgggccggtgatctgtctgtcgcctgcaaatatggggttttcaaaggattttaacagaggactggtcattatgataaccgctatgaaaaccttatcataatagcctattttagcatacaatagcccccctgaggtgtcaatctgtttaaagttaaaaaactattcataatcacagcagctctcacaaaatgttcacaaattcgcctcatttaagacgcacacatgtttaattatggtataaaacacaaaaaaagaaaaccctttttcaggattttcttacattatttcgttccgaacatgcggtctccggcgtcgcccaatccgggaacgatatatcctttttcatttagtttttcatccagagcggcaatgtaaatgtcaacgtcaggatgatgcttctgcacttcgtctacaccttccggggcagcgatcagacacataaagcggatattttttgcgccgcgttttttcaagctgttcagcgcctctaccgccgaacctccggttgccagcatcggatcgacgacgatgaattcgcgttcttcaacatcggatggaagcttgacataatactcaacaggcttcaatgtttcaggatcacggtaaagcccgacatgtccgacttttgcagcaggaatcagcttcaaaattccgtctaccattccaagccctgctctcagaatcggaacaaccccgagtttttttccggcgatgacgtttgactttgccatttgcacaggagtctctacattcacttcctccagcggcaggtctcgcgtaatctcaaatgccatcagcgttgcaacctcatcaacaagctctctgaattcttttgttccggtctttacgtcccggatgtatgtaagcttatgctgtataagagggtgatcaaacacatatacctttcccatatccgtcttcagctccttttttcacacacttctattgattctacataaaaaaacagcttgtttcaacaaaaatcaggagacaattttatgaaaaaagccgccccttttcggagcggcgcaaatatcttagtaatcaagcccggtatacaacgggaatctgtttgtcagcgcttctacacgctgttttgcttcttcaagcttcgcttcgtcttcatggtttttaagggcaagcgcaatgatcgctcccacttcttcgatcgcttccagatcaaagccgcggctcgtcacagctgctgtaccgacgcggattccgctcgtaacgaaaggtttttcaggatcataaggaatcgcgtttttgttgacggtgatgccgacttcatcaagtacattttcagccacttttccggtaatgccgagagagcgcaggtcgaccagcacaagatggttatccgttccgccggatacgagctcgataccctcttttttcaatgtttcagccaagcgcttcgcattgttgatgacattttgggcatatgttttgaattcgtcctttaaagcttcgccaaaggaaacagcctttgcagcgatcacgtgcattaacggtccgccttgaattccagggaagatcgacttgtcaatttgtttcgcaaactcttcacggcaaagaatcatgccgccgcgcggtccgcgaagcgttttatgagttgtcgtcgtcacaaagtcagcgtaaggaacaggattcgggtgaagacctgctgctacaagtccggcgatatgcgccatgtccaccatcacataggctccgacttcatcagcgatttcgcggaactttttaaaatcgatggtgcgcggatatgcgcttgctccggccacgatcagcttaggcttatgtttgagcgccttttcacggacatcttcgtaatcaatatactgcgtctctttatcaacgccgtattcaacgaagttgtactgaacaccgctgaagttgacagggctgccgtgcgttaaatgtccgccgtgagcaaggttcattcccaacacagtgtcaccgtgctccaaaatcgtgaagtataccgccatgttcgcttgtgcgccggaatgcggctgaacgttgacgtgctcggcgccgaaaatctgcttggcgcggtcgcgcgcgatatcctctgccacgtctacatgctcacaaccgccgtagtagcgtttaccaggatatccttccgcatatttattagttaaaaccgagccttgagcttccataaccgcttcgcttacaaagttttcagaagcgatcagctcaatcttcgactgttgacgtttccgctcatcttgaatggcgctaaaaacttgttcatcttgcgcaggtaaatgtttcatcagcgagatcctctcctatctgtttccatttcgttaattataccatctcattgtacacggtttttcatgcaaatgtaagagattatttttaaaattcgttttttattattggaaaaaccgaatattaaacgaatagacaaatcatatagttcgatatatcatttgtttaaaaaattattctaataaagaaaaaagcctgtccggctcttccccccgcttcttccgctactccgcttcatagacggcgcggacgcctccaatcagcttcggccttgtccgcgcaagcgtcacgtgcgcttcgcctagctgtttttgagagacgcggacaggaacggcaacaggctttaaatgcattcctataaacgtgtcgccgatgtcgatccccgcatcggcctctatttgttcaacaagaacaggagccttcatatgtttataggcatatgaagccatcgatccccccgctttcgggacaggaatggcgaaaacaacgggaagacggtatgctttcgccgtttcttcctcgacaaccaacgccctgtttaaatgttcgcagcactgaaaagcgagggcgattcctgttctgtccctgagctcttccagtcctttgtagaccgcttcagcgatttgttcgcttcccgaagtgccgatgcgccttccggccacctcgcttgtgctgcagccgatgacgacgatgtggccttcgcgcaaattcgcttgctgatgaaattcatctaatatagaacgccatgtctgttcaagatttttcatgattgacgacaccctttattcatgcttgtcttcataatcggcgatttttccgatgcggacggcgtgccgcccggctgaaaactcagtcgtaagccaaacctttgcaatctctctcgctaaaccagggccgatgacccgttcacccatcgcaagaacattcgtgtcattgtgctctcttgtcattttggcgctgaaaacgtcgtggacaagggcgcagcggatgccttttactttattggcggaaatgctcatgccgattcctgttccgcatattaaaatgcctctgtcggcttccccgttcgccactttttgcgcgaccggaaacgcataatccgggtagtccacagatcctgaaccgcattcgcagccgtaatcttcgtattcgatgttcaattcgtccatcaatgccataatttcttttctgatattgattccgccgtgatctgatgcaatgattactttcattggaatgactcctcctcgtttaatgtgccgccaaaagtctcgcagaaaccgttaagccagcatacagccgttatatacttctgattgatcatgtctattgtacccgctgccgcttgatttgcaaacgctccttagccagcttctattcctgagatttcttcgcaagcatttccgccaattttctcagcagctgctccagctcatctctcgttctttgatagtcgctgagagaaccgccgaacgggtcaataatgtccccgccatctccattaacatactctttcagcgtatagatcttatcttggctctttgaaaattcatgtactgccagctgcttgtgctgctctgtcatcgtcagaacaagatcagcccattccaccttctcctcggaaagctgtgaagatgtatgattcagagcgatgtttttttcaaaaagcgcttcgacagcatataaagaagcttttccgttttcaggagcaaacaacccggcagatttgacggagacatccagatttttttcggcagccgcagatttaaagagcgcttcggccatcgggctgcggcacgtatttccagtacagacaaataatatgttcaatcttgttcactcctttgtttcatattataaaggattcagacggaaaataataaaatccgctccagaaatcaaaaaagaggggatctccccctctttttctaagttccattatgttatgcaaaacagaaaaaagattttcccatctttcaattaaatgggcagcaaaagcttcagaccgaagctcagcaagatggctcctccgagcgcttcgctgtaggcgccgagccacgtttgaaccttttttccaagcagaaggcccgcccaagttaacaccatgctgaacaaaccgaacagaaagatcgttaatatcggtttcgttccgtagaggccgaggctgagaccgactgaaaagctgtcaaggctgacgccgacggcaaaaacgaacaagccgaagccgtgcggagagatgatctgctccccgcttttattaaaagatgcgacaatcatctgaatgcccagcaccaataaaagagctcccccaatatatcccgccagcgcaccaagcgcacccgaaagaaactgtcccgcaatcattccgccaagcggcatgatgacatggaacaatccaataatgacgccgatttgaaaaacctggttccttttcagcttggccattcccattccaagaccgactgaaaaggcatccatgccgagtgcaaaagccatcatcgaaagcgtcaggatttcgcctattaacacatcaacattcatgcaattcccccttggacacgccagcttttctagcttatgcacgtccaaaggcagatagaacacccccgcttaggctacgcttcgattacgcggtggccggccgctttcaacagccggttcataatcgcccggcccactccttcctcaggaaaagactccgcaaaaataaaatcgagacgttcttcatcaaagctgcggagaacgtcatacaaaccggcggcaaccgtttcaagtcggtctcttctgccgcagatgcggacggcatcggcctgatagacatcggcccgttcctctgtcgtaaggacaccgactttcatcccgtctttctgatattggtcgatcagccgttgaatatcctcaactcccccgttcacaatagcaagaggtgcttccggtgcataatgcgtatatttcatcccgggagacataggcgcctttttttcgtcggtgaggccctggtcaatcaagacggggccggccgcttcttcgagctgctcttttgtgacgccgcccggcctcaaaatgaccggaatttcaccggtgcatgaaacaactgttgattcaacccctactcctgtagggccgccgtcaacgacacccgcaatccgtccattcaaatcgttgacgacatgctcggctttcgtcggactcggttttccggacagatttgcgctcggggcagccaccggaacgccggcctgtctaatcagctcaagcgccacaggatgatcaggcattctaaccgcgaccgtgtcgagccccgccgtcacccttgtggataacaccccgggcttgcacggcagcacaagggtcagcggcccgggccaaaaacgcttcatcagcatttctgcctgaggcgaatcaacttccgcaaattctgcaagctgttcaatttcagcgatgtggacaatgagcggattgtcgctcggccgccctttcgcttcgtatattttagctactgcttcgctgtgtttggcgtttgcaccaagaccgtaaacagtctctgtcggaaaagcaaccgtttcattttgctgaagcagtcttgccgcctgtgcaatttgtggacagtttgtggacaaatcgcgttttacatccacagtccatacttttgttttcattaacatcaaaactcccttaacaaaacactaaaaacgttaataattcatgtaaatcatgttgaaagtataaaagatgaaagaaaagaaaacaagcgttgtccacattttgtggataacgcttttgaatccgtggatatctctgtgtataagttaatggctaatttgacgttttctccattaaaaccgctccgtttacgttcagtgagtctgaaacatgctcggattcatccagctcatcaggaattgccgcagcttgtttaaaaccgagcacttcaaggaaatccatcgatgttcgcttattggctactaaataaagggtttggattcctcgcttttcgcacaatacctgcatgctttgaaacaaggaaacgatgtggccttggctgagcttgtcagacacgacaagcgagcgcagcagtccttttttgttttcaaattcctccattccgaggcaggcgacgatttcatcgggagggtcttccatcatgataaactggctcttcgcttcctcaagacccttatggcttgtccccgccttttttaaaaatgcttcgatcgcattcatgtctttcgtttccgctaacctcaattggtagaacatcttttcaccccgttttttaacttctctatccaatctatgagggcgacagtaaaatataccttttgatttggaagaatgccggctattcatttttcaattttgattagcaggaaccaacgctttgaatgagtatgcaaatgaacgctgtactggtgataagacagtttctcttctgccggcaatgtgattggcacatcagaaaggggcaaaaggtgtatatccgaaaagcagtatttcccctgaaccgttttggaaaattatatcatattcaaaagcttcaataaccatcatgaaaaaacaaacagtaaaaaaccgccctgcacacgaaagcaaggcggtccttttaagaaaaaagcccggtaatccattcgacaagaaaaaatttcacttctttgtcttctttatctttatctatgccagataccgtttcatccgccgcgtcttttttttcttcccggcggtcttctccggcagcggtttgttcgtcttcaggcgactttacggcttccccattggaaaaatcaagaaagcaaagtggcggaaacaggacgcaccaccagttggctccctctcccttgcctaatgtaattaaaacagcctcatattctccggccggatacaccatattgccgtatagctttgtcggaaatgaaacacgatcaaaacggacagacacggattgccgaacattttcgcgtttcatgacatccatggcaacctcttggatttcaggcagcttcgacctgatgacttgtctcgcttcctcaaccgagatcaggttttccacccatttcgtaatttgtttattgacctcatccctgattttgcgtttgacgctctggtcgctcccgctgtcgctgtttgccaaaatccgcagccgaatcgcttcatcaggaatcacggcaggctgcccgcctgatgattgggcagtctcttccgtcgtgagatttgcaagcgctcctattaataaaagaaaaatatacatacaggcaatgtttgatttcttcattttccccaccgttcctctcgttcttcaaccttttctagcaatattatggtcaaagatggaacggtttaaacggctgctgaaaaaaatcctactaagcttgtaatctcttcctaataaatctacatatccaaatgactctgcttgtttttttgcaggccggataaaaaaatcaccgcgctgatcgccagcagcaagccccccaatccgccgaacagcaaaaacgggaagacagcggctgcgcttgcatcaatcgcccagccgatcaagaatgaaagaagcgctcctcccagacttgcggacgaaatgaagagactcgtgatttcctctgtaaaaggctttccagccaacgaggcaagagtgacggcgcacggaaaaatgccggctgccgacagcccgatgaaaaatacgaggagcagctgtgtttgatgaaccggaaaccacgcgagaatcaaaagcaaaacagtcaaggctccggcgctgaagatcagaaagccaacggaagttatgcgtccgccaaaaatacttgtcaataaacgtccgcataccattcccgtccaaaaaaacgtgacgctgatcacgctgatttcttcagcccctttttccagcatcagcgccggcaaaaagtttgcgaaattggtctcgatacccgcatacacaaaagcgaatatgagaaagaggaaaatgtttttttctttccttccggtttcaaatatggctgatacagtcggtttttcctgataagccatctgaccggaagcagtgccgggggtttttctgcgcaaataaaccacccacatacacgcgagcacaaaaacgaagataaataaagcatacaaggggaaatgccaggcatatcgttccgtaaggatataaataagaaaaggaaacagcagcgcgcctaatccgaaaaaaacctctaaaatattcatccctttcgcatttttatcttgcgcaatcacatacgcccccatcgtcgtttctaaagtacccgcgccaaagccgagcaaaaatcccatgatgacaaaaaagatgaacatatcaaaaaggaaaacacctaaaagcgtaacgagaataagaagaaggccaaacgtcaatacagccgtatgagaggtgcgtctgacaaacatcggcgcaagcaggacgccgtttagaaaaccggtgaattggaaaaagatcaggaaggatagatcatgaagatcccgttgatattcttgaatgatgtacggtgacaggctccccagcagaatatggataacccctactagaaaataaaacgaacagccgaatagaaatatttttttcattagactcactccttcgttgcagaccataaaacccttgcggcttgggtggcacagccggcaagggtctttcgcaatgctagtttgcttgttttgaaagggacagctgctgacctttattgaaaaattcatttaagtagaactgcgtcttgtatccatcttcaaaagtggcaagagatgcaaaattgcgatcccgaattccgttcatccattggatcagctgaactctgaaggaatcggcccatccgtaaaattcattttcagggtctgtcagccacgtgtccggcattgttatcatctgctccgtcaatccggccctcagcaaaaactgatttttctgccgtgaatgatagtaaaatacgccgttttggccgttgacctcgatgctgaagccgcactcatccgattttgtgcattttgacgtaatcatattgacaaacacatgattttcaagctggccgtatacttctgaatgatcatcaacatatacctgtttttgttctttttctttgacgaccgtcatcattttgacttttaaactgtccagtttaaacgggctgtcgaacaaatagagtatgagatcgattaaatgcacgcccaaatctcctaatgccccgctcgttttgttgcttttcgaatgatcgcgccaagtatattttttcttctcaaggcgctgtttttcttaaaatggacattgatggacaaaatatctccaagttcattgccggatatcatatcttttaggcgcttaacgaatgtgagatggcggtaattgaagcccatgatcggaatataagcggattgagacgccctgcttttcatctcctccgcttcttccattgagacagccatcggtttttcacacaatacatacttccctgcagccatcgcttcaagcgcatgttctttatggcaaaagttcggcgatgaaacgatgactgccgtcgactgattcaacagctcctgcatactggtaaaggcagttcctccgtattcaaacgcacatttacgagaggcaagcgagttgatatcaaaaaacccggaaagctcggcacctttgactgttgaaagagctttcgcatgggcttttgcaattcctccggctcctataattccgattttcatctaaggacactccttatcgtttgatatgggcttttagcacttctaaaattccagccgtatagctgccttctgtcatacgggaatggagcgacttggcttctgctgtcgcattccccaccagataaccatgtccggtttttttaagcatatccacatcgtttccgctgtcgccgaaagcaaatgaattctccctctctatcgcgaatttatccaatataaaatccacaatgtacggtttgcctgtccgcaaggggataaagtccacatcatagctgttttccggatcgcctgccaaagggttgcagcgattgatatttactcctattccatgctctcttgcaagccgcctgatggcttcaagcgccctcttatctgtgctctcttccaacgatttatagtaatagttgattttatagcgggaaaagccatgctgagtctgaggcacaagcgcaatctcatattttttagagagagtctgcttgatttcttcgaccagatcatgggagaaatttgattcttgcaatcgggcttcccaatctttatcagagacttggccttcttcagagaaataagtgatttcagtgccaaggtcaccggcgacaaaatgcggaagatatcgaaagcctccccgcttcatttttgcaagaacggatgacaggctgctcccggtcacccagccgagcaaaatcttgtgatcaagatggtgcgaatgaataaatgtttcaaggtccatgagcgcttttctcgattcatcggtgatgctgtgggcgaaatatgtctcatcaaaatcgcaaaatacggcgtacttcggcttgtttacttgctgcaaggtgtgaaaagaaagtgtttcatgatacgacatcaattaaggcctccattactttgtcttgttcttctacggtgagccccggatagagaggaagctgaagcatttgtttatgcactgattcagtgaccggcagtgatgtgtgccgataattggcttttacaagtggtgtgttttgatgatgggataaaatcgggtagtatatatctgtttggacattatgaaatttaagcatcatatctttgacttggtcacgatttccgtttagtattttaattgtaaacaaatgccatacatgatcatcggtcatttgaggcaatttgatcagacctctgtcttcatactgctgcaaatgcgcaatataacgatctgctaaatataagcgcttcagattatttaaagaaagatatttcatccttgccagtccaatagcggcttgcagattatcaatcttagcgttaaagccgtagtcagccgcctttttatttttttgattcagttcaaagccgtgatacatatattccatgcatgcggatgcaaatgatggatcatccgtcacaattgcgccggcttttccgcaagtgccgagatttttatacggattgaagcttaatatggagcaaaggctgttttttcccagatcggaaacgccgatcgcctggcaggcgtcttcaataatcgggatgccgtatttatcagcggtttttgcaatggcttccatgtcaggcagctttccataaaggtgtacaggcaaaatgcatttcgttttcaaagtgacacatgcttcaatttctgaaggatccatgcaaaatgtaacagggtcaatatcgcagaaaatcggagtgcctccagctgcgagcacggcgttttctgttgcagcaaagctgtttgcaggcataatgacttcatcaccttgtccaacacccgcagccttcagcgcgacaatcatggcatcggttccgctggatgaagccatgacatgctttttgctcaaaaaagcagctatttcagcttcaaatacgccaacataaaaaccgcttgtaaattgcccggtcggcagcacgtctttcaccgcatgaaccacgtcatctacttcttcttctgtgatcagtcgatgaagcggcataaagtcaactctggagggcggggaatccattctgttcagcaaattggcggttatgtcgaattgatcctgctgcaatgtctcttttaatttttgattggccagtgtgtcgtctatacggcattcaccagcgagctttccttccttcaaatcattcagaaggacaaatagctgtttgctcgtgcaagtcatgttttcgtttgcggttttcatcaatttcaccccatttttattattttgggaaattgtcatatttcatgacatatcttaaatgatggaatcgataccataacaactctttttttcaggaagtgactttatgcctacgattgacgaaattgcaaaattaagtaatgtgtcaaaaacaactgtttcaagagtactgaacgatcatccctatgtatctgaagaaaaaaggaagcgggttttggaagtcatcgaaaaattggactacatcccgaacacgtctgcacgaaagctcagatccaacaaaacgatgtttctcgcagtgtctgtcccacacgcggaccaccccttcttcgctcagcttatgaagcatatgtccgctgaagcgctgaaacaccaatacaaagtcattgtgtttcagacgttttatcaaaagcagaatgaactgaaagtactggagctgctcaagaggaaagaagtcgacggcgttatgctatgcagccttgaaaatgaatgggaagacatcaaaaaatacgtcaaatacggtcccgtggttatggcaaatgaattccacgccgaagcggacgtgccggtgatctgctatgacgaattcgaagccggatataaaggaacggagctttttattcaaaaagggcatcatttaatggccttttgctgtgacacgatacacagcaaggcccagattatgagaaaagaagggtttatgaaagcattgtctgatgcaggtttgcgtttccaggagaagtggatgttcagccacgcatttaccattcatgacggcttccgcattatggaccagatccacaacatgtccgaaaagccgaccgccatttttacgggaaacgaccaagtggccgcaggaattattaaaagggcccgatattatcaatatgaagtgccaaagcagcttgcagtgcttggatatgacaatcaatcgatctgtgaggtgaccgatccggaaatcacgacaatcgatatacctgttgaagagctggctcaaaaagccgtatgtgcaatggtaaaccttctgaatggggaaagcggcttacagagggatgtcgtgacactgtcccctgcattaaaaataagacaatctgtttagtatatatattaatcttgaactattttttattttattcagataaaaattttgttaaaaaatggtaaagcacgccgccagaacggtcaaggctgcggttcctattttccaccgggaatttgagccgccccccttttgttcgacacacttaacaattggaggcgcagttttctaatggctaaatttacagctgaggaactaaagggtaatttgcggggaatgaagggcataaacggatcaagatcaaatgaaaaggcatgagcctggtacaataccggaatcatgccagttaaactgtttcatgacattttattgtctaacttttggagtcacttttaactatgttgttcaattaccgcgcagacgatgcggtcttttccattaagatctttcttcacccgcacgtcagcatcaggaaagaaccggtgaaacatgtctttaacggcattcccctgagtccagccgatttcaaacaccaccagtgcctgatctgcgatgacagatggaatttccttcatgaaacgcttataaaactgcaatccgtcagcaccgtccgttaaagccccggcgggttcatggagacggacgacatctgacagcgtcctcatgtcttcctcggatatataaggtggattcgaaacgatgacatcagctttcttctgtcgcgcgataagcggttcaagcaaatcaccgcagaggaaatccactttcgccccaagccggtcagcgttgtgtcttgcggtacttaaagcttgttccgaaatatccgtcgccgtgacggaaaaacgcgggctctcaagcgcaagggtcactgcaatcgccccgcttcctgtaccgacatcgacagctttaagacgatctgtcccgtgaaaaactctttccgcttcggaaaggacagcttcaacgacttcctctgtttcaggacgcggaatcagaacgtgttcatttaccgaaaattcccttccgtaaaaggactcttttccggtgatatattgaacaggcactccttgatgatgaagctcgacagattttttaaacctcgcaaaatcagactctgatatgacatcatggaagcttgccaacagtttgctgcggtcgatgttcagctgatctgtcagcaaaatttccgcggcattccggtctcttcccgcttccgtcaaataagaagaagcccacctgagggcttcaaaaattgttttcatgtttagctctccgcctgctgaagcttgcttgcctgatcctctacaatcagggcgtcaatcacttcatcaagcttgccttcaaggatttggtcgagcttttggatcgtcaagccgatcctgtgatcggtaacgcggttttgcggaaagttatacgtgcggatgcgctcagagcggtctcctgttccgacggcggatttccggttttgatcatattcagcctgagcttcctgctgaaatttgtcgtaaattcgcgcgcgcagaaccttcatcgctttttctttgtttttgatctgagatttctcatcctggcaagacacgacaacacctgtcggaaggtgggtcagacggacggctgacatcgtcgtattgacgctttgccctcccggaccgctcgatgcgaaggtgtcgacgcgaatgtctttttcatgtatatcgacttctacctcttccgcttcaggcaggcaggctaccgttgccgtggatgtatggatgcgcccgccggattcggtctctggaacgcgctgtacgcggtgtgcgccgttctcatacttcagccttgagtatgcgccgttcccattgatcataaaaatgatctctttatatccgcctgtacctgtcatattcgcttccatcacttctgttttccagccttggagctctgcgtagcggctgtacatgcggtaaaggttgccggcaaataaagcggcctcttctccgcccgctgcgccgcggatttccatgataacgtttttgtcatcattcggatctttagggatcagcaataccttcagctgatctgtgagcgactcgatttcttcctgcagttcggaaatctcctctttcaccatctcgcgcatgtcggagtcaagcttttcttcaagcatcgctttagcatcgctcagctgttccgacgcgctacgataacgtctgtatacttcaactgtttcctgtaaatcagattgttctttcgaatattctctaagcttcttcggatcgttgacaacctccggatcgcttaatagttcatttaatttttcgtaccggtcctctatcgattttaaacggtctaacacgctattcacctctgtttgctgtgcgtaacattctaattatagtatagggactcttccccgtcaaaacaacttcgccgttatcggcagcagccgcgtctttttgctatacttttaagaaaaaaggagcttgactcaatgctggaatcgattcatcacatcgccatcatatgctcggattatgaagcatccaaaacattctatgccgacaagctcggacttgagattctgagcgaaacgtacagaaaggatcgggaatcatataaactggacctctcattaaacggccgctatgtcatcgaactgttttcttttccggatccgcccgcacgccttaccagacccgaagctgccggactccgccatttggctttcacggtggccgatcttgaccagaccgtcaaggagctcaagcaaaaaggcatcactgctgaaccgatccgcaccgatcccgggacgggcaagcgctatacgttcttctccgacccggacggcctgcctttagagctttacgaagcatagcaacggctgcaccctctggggaaaaaccgctttctttgccgaatcccttcttcttttgtctaacaggaaggaggccttttcattcaggtcgaataccctttttaatgaacagttacaggttaaaaggaggtatcttatgaatactgctgatgcggcaaatgaactgggggtttcaaccaaaacggtgcagcgttgggtcaagcagctgcaactgcccgcttcccgaaatgagcttggccactactttttcacggaagacgatatcgccattttaaaagaagtaaaagagcagttgaaaaacggtacgcctatgcaggatgtcacggtcaaacgcccgaaaaaaaccttcttcatcaagaaaaacgaaatgattcaaacgaaagagcctgcactgcaattgaatgagcggctcgaagaaaggctgcagcgttttttagagcatgaacagcttgaacgcgagctgctccaaaagaaaatcgccgagctggaaagaaagctggagcaaaaagcggacgatgtcgtctcctaccagcttctgcagcaaaggcgcgaacttgaagaagaacggcagcagatcaagcatctcgagcagaaaatcagccaattggaaagcatgaaccgccgggaaaaagatacagccgtcagaagagaagaaaaaaaaccgaagagcaaattgaaatcgatcttctctttttaaagcgcaaaaaagcttgcaaggccataaacggcttcttgcaagcttttttcttacttaagctgtaattgcaatcaatatcggcagcgaaataattgacagcaccgcactgatcacaaacgcggatgccgtttccgcttcctggctttcaaagtttgtagcaatcatggccgccacagcagaaccagggaatgccacgagcagaaccgcttttgtcatgtcggcagaagaaaggccgacgaccatcgcgatcacaaacattaaagcaggctgagcagcgacttttaataaagcgatgctcaaggcaggcatactgaatttaattttgcggattccgacagtcaccccgactgcgaatagggcgattcctgaagtcgtatctccgagcatatcaagcattttctgcggcaattcaggaatttgcagaccgaataacacaagaatgatacttgcaagcggtgcaaaagcaagcggttcagacaaaccgtgtaaaattgattttcctgtcaccttccaaatgctgtccgtcgtttccgtttgtttttttgaagaacggccgacggttccgacgatgatcgcaagaggatcaagcatcgcatttacgacaattcccgtaatcgcgattggaatcgcaacttcctgcatgccgaacaggctgcccaatacaggaatacccataaaggcgaatgtcggctgtgctgagttcaatgagaacattgaagcatctgttaaatcgtatttaaacaaaaatcgtaaaagaagcaaaataataacgtaaaatccaacgataccgattaccaatgaaatcataagcggaatctggctgtaaaacttatcttttggcgttgacaaaatgcttgatacaaagtgggccggaagcgcgtatttcgttacgagcgtacttaccccttttgctgatttagcatcatagcttccaaagtgacccgcaaaccatcccagcgcaataacaaaaaatattggcgcaaggaggattaaaatatttaaaaagctcaaggctgtttcctcctctatgttgtccctttcagggacgtattaacggcggctgataaacgcggtcgccctgttacacagccgccgatcccatttttttcaaatttgattggtgcagcccggtgacaaaacatccgcacccgggctgccgtttcttttatcgtttcctcagaacctaatattagtcttgttttgcaacaattgttttatactccggacgccacatggcttcgcggacagccttttcgacatcttcaggctgaacttgggccacgccgtctttaatggcagcttttacaacgtcgatcgccacttgaacggatacgtcttgcaggtcgtcgattttcggcagaagacctgcacccggcttttcatgatccaccatgttcgcgaccgcgttggcagatgcagcaaacatgccgtttgtgatgactttcgctttcgcaacgattgtacccaggcctaatccagggaatacaaaagcgttattggattgtccgatttcgtgtttcacgccattgtactcaacagcttcaaacgggcttcccgtcgccacaagcgcttttccgtccgtccatttgaacaagtcttcaggaacagcttcggccagatgtgtcggatttgacatcggcagaatcacaggacgctcagtatgagccgccatctctttgatgatttcttcactaaaggcgccggcaacacctgatgtaccaatcaggatcgtaggcttcacttgacggatgacttcctcaaaggaaatctctcccttttcattgcgtttccaatctttcacttcttccgtatcgcgcaaatacggttcttggaaatccatgatttgatccatgcctgtcgttaataatcctctgtaatcgactgtccagaatgcacggttggcttcttcttctgaaagcccttcaagcaccatggtgtcgcggatttggtcagcgattcctataccagcagaaccaggtccgaagatgacgacccggtggtctttcaaagacgtgccggtctttttgacagctgctaaaatcgcagccagcgtgatagcccctgttccttgaatatcatcattaaatgttgcaattttatggttatatttactcatgatattgcgggcatttttatttccgaaatcttcccagtgtagaagcgcgttagggaaaagcttcaatgctgtttcgacataagcgtcgataaattgttcatagcgctcgccttctacacgcggatgacggtttccgatatagagcggatcgtttagcagtttttcattattcgttccgacatccagtacgaccgggataacgcggctcggatcgattcccgctgccgccgtatatactgcaagcttaccaatcgcaatattgatgcctccgacgccccagtcgccgatccccaaaatgctttcggaatctgtagcgacgatcaaatcgatgtcatcagcagacgcctgcaggtttttaaaagccgtttcgattccgtccatatcatcgattgacaagtaaacgccgtgcggtctgcggtattcgtggctgtattcctgaatcgcttcgccgacagtaggcgtatagacaaccggaagcatttcacgcaggtggttttgcaataatttatagaaaagcacttcgtttctgttttgcagatcgttcaaatatacgttttggcgaagtctgtcaggttgacgggaaaattgttcgtaagcccgttctgcctgctgatcaaggctgagaacagtcggcggcagaagcccttctagaccgaggttctttctttcttcaagagaaaatgcaacacctttatttagcgttggaatggaaagaacgtctttaccccgcaaagaagtctccaaatgtccttccttcgttcttctcatgttgttcacactaattaccttctttcttaaaatgttaatgaagtgaaataaatacggtaaacaatatagaatatttgcctttttacacatgtagatttgtcaaatatgtaacgcgcgttttttgacaaaaaactgaacatttcctaaaacctatttactttttactgactacagtaagtcattttatgcctgcttttgtcaaaattcaagcgatgaaaattagttaattttttcgtattcttaattaagttttttaattacattaattcccgcaaaaaggattcaataaaaaaaacacttgtttttaccaagtgttttcgagtgaaaatctatatgtttttccgatttcatttcgggtttccaggcacttcatgatggtggcggcagcgcgcttcatatgcttcggaggccccaaccaaaatgaccggatcgtcataagaagcaggttttccattgatcagcctctgcgtgcggctggctggagatccgcagacagagcacacggcttgcagcttggtcaccgtttccgctaaagccatcagatcgggcacgacgccgaaaggctcgccccggaaatccaaatcaaggcctgctgcaatcacacggtagccctgatcagccagagaagttaacgtgccgacaatcgtttcgtcaaaaaactgcacttcatcgacgccgatgacatccgtttctttgcttatgtattgaaaaatttcttccggagatgcgatggcatggcacacaatggatgtcccattatgcgatacaaccgattcgctgctgtagcgattatcaatggctggtttaaacactttgacttcctgcttcgcaaacgtcgcccttttgatccggcggatgagctcctctgatttgcccgaaaacatgcttccgcatatgagttcaagccagccgctttgcttcatgatgtacatccaactaactcctctccagcaattattgcaagtaaaaaacaggcaagaagaatccctgcctgtttatcatatctattattacttaagaccgtattttttgttaaagcgatcaacacgaccatcagcagaagcgaatttttggcggccagtgtagaacggatggcattcagaacaaatctcaacgcgtacctcttcttttactgaacctgtttcaaattcgtttccacaagcgcatttgactgttgcttttttgaactcaggatgaattcctgctttcatgtctgtcatctccttccgccctgaatccaattcggaaacagagttattattccggggcaaaacctccggaacgcacatgatagaattataacagcgattcggacgttttgcaaactaaagttttaaatcagcgccttgcagcagacatattggcttgtttccattcctggatcagaatatcgaaaaactcctgattcgttttcgtctttttcatttttctcatgaatttctcgacgaagtcaggcgtgtcagacatcgttttccggattgaccacagacgatcaaggtgctctttcggaacgagaagctcttctttacgcgtacccgaacggcgaatatcaatggcaggaaagattcttctttccgcaagagaacggtcaagatgaagctccatgttccctgttcctttaaattcctcatagatgacgtcatccatccgcgagcccgtgtcgacgagagcggtcgccaggatcgttaagctgccgccctcttcaatgttgcgggctgctccaaagaaacgctttggacggtggaaagcgccgggatcgattcccccggacaatgttctgccgctcggcggaatgacaaggttataggcgcgggcaagccttgtaatgctgtccattaaaatgataacgtcctttttatgctcaacaagcctcattgcacgttccaatacaagctcggccaccttgatatggttttcaggaacttcgtcaaacgttgagctgacaacgtctcctgcaaccgaacgttcgatgtcggtcacttcctcaggtctttcatcgataagaagcacgatcagctccgcttccggatgattggttgtgatgctgttcgcgatctctttcaagagcatggttttacccgctttaggcggagcgacgatcagaccgcgctgtccaaagccgaccggcgccatcatgtccatgatccgtgttgacaggtgattcggcttcgtttcaagcaccatctggcgatctggataaagaggcgttaatgccggaaagtgcacgcgttcttttgctgattcaggatcgtcgccgttaaccgcttcaacgtgcagcaggccgtaataccgttcgttttcttttggagggcggacctttccggacactttatcaccgtttctcaaatcaaaacggcggatttgtgaggcggaaatatagatatcctctgaactaggcgagtagttgatcggtctgagaaagccgaacccttcggactggatgatttccaatacgccttccatgaacagcagatcttcctgttcggcgtttgctttcagaatggcaaaaatcagttccttttttgtcagtttgctgtaataagagactttataatgccttgcaagctcatacagctcttttaatttcatattttccaaagatgaaatggatacatctttcactaagaacaccactcttttctaatcgaataatttactttgtctcatcaatttcacgaaagacgattaatgtatactgccgattcgttttaccggcaacgcttctacccatatatatcgacgtattgaaaaggattataagtatgagtcgagaaagaagcgaggacttaacaagagaagataatcgcatatctgatagatgcggcaggattttggttctctctaggaaccagcatgtgcagaaaatttcgcagcactctttagttttacctcatttgtcgtacatattcaacttcatttatgatttgacatgaaattgatagagatgaccctgttttgaaaaatgccttgacatgaagaagaaaagccgttagctattgtatcagagtatgaaccttgattcaattcgtgaagtgaaatacaagggaaaagcgggtcgtttatatccccgcttttccttttccttatggccggatgactaggttaggttttttcttgagactgtgtcttccgtccacaaaccgtaccgtaccggattttgccctcatgactacgctgtgggtcgttccaacagatcctttgaattgcacgcctttcaggagctctccgtctgtgacgccagttgcggcgaaaatcgcatcgtctcctttgacgaggtcttccatgcggagcactttgcccgtatcaagccccatcttttcacagcgtctcagttcttcctcactttgaggaagaagctttccgtgaatttcccctccgagagctttgagtgcaacagccgagagtacgccttccggagcgcctcctgagccgaataaaatatcgacgcctgtatgatcaaaagcggtgttaatcgcaccggccacgtccccgtcattgatcagcttgattctggcgcctgcttcgcgaagctcatggatgattttctcatgccgcggacggttcaaaatcgtggctacaacatcttccacatctttattctttgcttttgccacagctttcaagttatcaatcacaggcgcttcaatatcgatgcagcctacagcttcaggacctacagcgattttatccatatacatgtcaggcgcattcagcaggtttccgtgatcagccaccgcaatgactgcgagagcgttccatccgccgctagcgacgatgttcgtcccttcgagagggtctactgctacgtctactcgagggccgtagccgttgccgagcttttctccaatataaagcatcggcgcttcgtccatttccccttctccgattaccaccgttcccttcataggaatggtgtcaaacacatccctcatggcgcttgtcgcagcgtcgtcggcttcgtcttttttacctcttcccatccagcgcgctgactttagcgcagccgcttctgtcacacgaacaagttccatcgataagcttctttccattcctatctaatctcctctcacccatatgaaatcgttttatgttttatctataacagcatttgtcgatcacgagttttgcagctgttcaatttcctggtctgtcaatttttcgcgccagacagtggccccgagctttgtcagcttttcttcaagctgactgtagcctctgtcaaggtgctccaaaccggtgatttccgtgacaccttccgccattagaccggcaacaacgagacatgctcccgcccgaagatcactcgctttcaccttggcgccctgcaaaggagctggcccggtaatgatcgccgatcttccttcaaccttcatcgacgcacccatgcgtctcagctcgtcaatatgtttgaagcgagcggagtaaatggtgtcagtgacaacgctcgtcccgtttgccttcgttaaaagcgatgtcatcggctgctgcagatcggtcggaaagccggggtatacgagcgttttcaaatcgaccggtttcagctctttctgtccgccgaccattaaaatctgctcgctgctttcttcgattcgaacccccatttcgcggagcttggcgattaacgattccaaatgcgtcggaattacattatcaatcagcacttcttgtcccatggaagcagctgcaatcatgaaagtgccggcttcgatccggtccggaataatcgagtgtctgcacccgtgaagcgattcaacgccttcgatgcggatgacgtccgtaccggcgccttttatttttgctcccatgcttgttaaaagagtggcaacatcgataatctcaggttctttcgcagcgttttcaattacggttctgcctttggcaagcacggcggcaagcatgatgttgatcgttgctccaacactgacgacatcaagataaatgcgcgcgccttttaattcctccgcacgcagatagatcgcaccctgttcgtttgtcacttcggctccgagcgcctcaaaacctttgatatgctgatcaatcggtctcggaccaaggtggcagccgcctggaaggccgatgaccgctttcttaaagcgtcctagcatcgcgcccattaagtaataagaagcccgaagctgtttcacttttccattcggcaaaggcatgctgatcatcggcgcaggatcaacgaccatttctcccttttcaaagtgaacgtttccgccgatctctctcagcagatcgcgaagcgtcaaaatgtctgaaatatggggaaggccttcaagcgtaaccgtcgaatcagccaaaatcgtcgcaggtatgagagcgacagcgctgtttttcgctccgcttatatgtactgtgccattgagaggatcgccgccagctatatttaacttttccatgatcgtctccttccttaaagaagatagctaatggagcgcttcataatgagatttccttcaaactcaaaataaatggttcatttcaaaatctatccaattaaaagagaaagaatacaacacatttcaaatttatcgggaagaaaagtagcgaagcagactgcggcaaggttctcttctgcaaaacattcatttctctttgtaagacaaaatggtgacaaacggagggagtccctccacttgccacccacatgaagcaattatttattccagtcagccaaaaactgttcgatccctttatcagtaagcgggtgctttgtaagctggtgaatgactttgagaggcatcgtgccgatatgagctcccctgagcgcggcctcagtcacatgctgcgcatggcggatggacgcggcgatgatttgcgtgtccaaaccgtgcacatcgaaaatttgtttaatttcactgatcaagtcgaggccgttgtggccgatatcgtcaaggcgtcccaggaacggggaaacatacgtagctcctgctcttgcggcaagaagcgcctgatttgcgctgaagatcagtgtgacgttcgttttaattccgagatcggttaatgctttaacagctttcaggccgtcaggcgtcatcggaattttcaccgtaatattcggcgcgattttcgcaagctcttttccttcttcaatcatctcttcagccttcagagaaataacctcggcgctgactgacccagaaaccacttcggtaatttcacgcagacggtcatgaaacgaaatgttttcttttgctactaaactaggatttgtcgtaactcccgcaagcacgccgagagcgtgcgcctctttaatttcgtctaaatttgcagtatcaataaaaaacagcatattgataaaacctcctgtcatgaaaatgtctgaactgtggaacttgtttgcgctttccggatgatatggataaaaccgcctgtcgctatcaggcggcttttttgactgaacgggaagcaaaagagcctcatgccgtcacatggcatgtgttaacagcacttccctctaaaacaccagaaaaacatcctgtttccccggctttgcgggaaaacagatgcttttccaatcgtcattatgctttgtttgaagaaccaaattcgcgcattttgccgataactgtttctttgatagcttcgcgtgcaggtccgaggtatttgcgcggatcatactcttcaggcttcgcagccagcgtttcgcgaacagctttcgcggaagcgatttggttttcagtgttgacgttgatttttgccgtacctaaagaaatagctttcttaatgtcggcagtcggaatgcctgtaccgccgtgaagtacgagcggaagaccagttgtatttccgatttcttccatttctttaaatccaaggtttggttcgcctttgtaaggaccgtgaacagaacctaatgcaggagcaaggcagtcgattcctgtgcgctcaacaagctcttggcactctttaggatccgcgtagatgacgccatctgcaattacgtcgtcttcctgtccgcctacagttccaagctcagcttcaactgatacgccgtggaaatgagcgagctcaacaacttttgaagtcgtcgcaacgttttcctcgaaaggatggtgagaagcgtcgatcataacggaagtgaatcccgcatgaatcgcttttgcacaggattcaaagcttgaaccgtggtctaagtgaatcgcaacaggcactgttacgttgtattcttccatcagcgctttaaccattgcaacaacggttttaaaaccgcccatatagcgtcccgcaccttctgatacaccgaggataacaggagatttctcttcttcagcggcttgtaaaatcgcttgagtgaactcaaggttatttaagttaaattgtccgacagcatatccgttttcttttgctttattcaacatttccgtcattgatactaaaggcatgtcgaaagtcctccttatgtagcctgatttgcttttgcgaaaaaagcctccacacctacctagcatgaccagaaaaatccgccatatgtaaaatgttttgttttttaaaaaacgttagacagcttttctctacttatatagaataacaattaatcaacaaatcggcaacattgtgactgtgacaacatcaaaaacttttccgctatccgttggactttatgggcagatacgttttgacggcatcgcggatttcgtcgatgtcaaaaggcttagcaaagtgtgtcagggctccgagctccttcgattcctggatcatgtcgagctctccgtaggccgtcatgatgatgacgcggatcccctcgtctatgatcttcattctttttaaaatttcaattccgtccattccggggattttcatatcgagcagaacgaggtcggggcgctggtttttcacaatgtcaagcgcttgaatcccgtttgcggcctggaaggttttgtacccttctttattgaaaacttcattcagcagaacccgaatcccgtactggtcgtctacgattaaaatcttctcattcatgatttacacctctatatttataattttcgccaaaattaagcagtagtttatctattctgttttgtttttcccttttcctttaattaaaatatttaagtttgcgacatatttagaggatttttcccattattctcttttgttatataatgatagtcagtaaaaaaggaggagtcaccttgcttaaaattttcaccactcaattgacgggaatcttcaaccggattcaagagggcgaggcccaatcgatagaggacggcgcccgcttgttggctcaggcggtcatcagtgatcattcggtttatgtatacggaaaaaatgaattggaaggcattttgaaagaagcgatgtacagttctgaaccgttcccctcagtcaaaccgctgcagaaggacgaagaaaactggcccgattttgaaatgacggacaaagtgctgatgttctgcgccggttcagcggatgacgaagaactgaaaatggcggaaaaactgtatgaaaaaggaatcggacttgttgtcgtctccccttcgggaaaagacggcgtcccgatcgcatccttcgccgatgtccatatcgattcaaagctgagaatgccgcttcttcccgatgaagacggaacaaggtacggatttccgtccctgatggtcagcctctatatttatcatgccctatcctttacattaaaggaaatcctccaagaataccaataaaacagggttgcctaaaggaaattagtgacgtgaggccggcctaatgaatatagtaccagttcgggccgccattatcatcagaaagagcccaaaaaagcccgccggcgtgatttgccggcaggctttttcttttttacagcttttccgaagtctttagcgaagcatgtacgaagtctctgaacagagcctgaggtcttgtcggtcttgacgtaaattcaggatggaactgagacgcgacaaaccatggatggtctttaagctcgataatttctacgagacggccgtcagggcttgtcccggaaaatacaaaaccggcttcttccatctgctgtctgaactcattgttgaattcgtagcggtggcggtggcgttcatacaccacttcattttcatatgcctgatatgctttcgatccttcttgaagcttgcacggataaagtccgaggcgcagtgttccgccgaggtcttcaatgtccttttgttcagggagaaggtcgataatcggatacggtgtagacggatcgatttcggctgagtgcgctccttcaaggccgagcacgtttctcgcgtattcaatcgatgccacctgcattccgaggcaaatgccgaagaacggaatcttttgttcgcgggcatatttgactgtcgtgattttcccttcaacaccgcggtctccgaatccgcccggaacaagaataccgtccgcattttgaacaagatcggcaacgttgtcttccgtcacttcttccgcattgatccatttaacttgaatgtctgcatcaaacgcataacccgcatggcgaagcgattctacaactgaaatgtaagcatccgggagctcaacgtatttaccgaccaaagcgattgttaccgttttggacagatttttcacctttttgacgagttctttccactcttccatatcggcttctctgcaatccagcttcaagtggctgcaaaccaggctgtccaggccttgtttttgaaggtcgagaggaatggagtagagcgtatccgcatctccagcctcgatgacggctttaggatcaatgtcgcagaagagcgcgattttatctttcatgtcctgagaaatcggcatttctgttctcacgacgatgacatttggctgaatgccgaggctgcgcagttcttttacgctgtgctgagtcggctttgttttcatttctcccgccgctttaagatatggaacaagcgtacaatggatgtacatcacattgtcgcggccgacatcgctcttgatctggcggatcgcttcaagaaacggcagcgattcgatgtcaccgacggttccgccgatttcagtgattacgacatcagcgtgcgtttcttttccggcgcggaatacacggtctttaatttcatttgtgatatgaggtattacctgtacggttccgcctaaataatcgcctctgcgctcttttttcagcaccgtggaatagatttttcctgttgtcacgttgctgtatttatttaaattgatgtcgataaagcgctcataatggccgaggtcaagatccgtttccgcaccgtcgtcggttacaaacacttcaccgtgctgatacgggctcatcgtacccgggtctacgttgatatacgggtcaaatttttgaatggtgacattcaaacctctgttcttcagcaggcggccgagcgaagacgccgtaattccttttccaagcgaggatacaactcctccggttacaaagatatattttgtcatttctgtacccctctcttcgattaacgcttatttcttaaaatgctctttttatgaaaaatcatttagatcttttctaaatgatttaaatgattaggaggcggaaaaacaagaaagctccctttcaatttcttgaaagggagctgatagtccgtatcactcgaatctcttcgttttgaagagcccaaaatacatactacctagttcgcctgtgaaagtcaagatcgatttaaacatgaattccgttcagaaggcaattactcttcgtcttcctcttcatcaaaatcttcatcatcatccaggatctcgtcttcaagatcatccagctcatcatcgtcggcttcatcgatttcatcgaattcatcggcgtcaatgtccaaatcttcttcgacatcgtcaagaagaatatcatcctcgtcgatttcttcgaattcgtcaagatcaagatcttcttcaaccgcttttttcgcttttttctttttcgcttttacagtcggctgggtttcttcatcaagctgatcatacggataccagctgcgcaggccccacgtttggtctgacagcgccaaaaagcgtccgtcgatatttaaatctgtgtagaactgggcgatgcggtcttccagctcttctttccccattccaagcaaggaagccacttgatctgttagctcctggaatgtaatcggttttttgtgttccgagaaaatttcgtatgcgatttcaactaaagccatttcctttagctgctcctctgagtattgtttcaaactcatcgccagacactccctttctatcttcatgtatgtatctactatctctgtcatagaaaataagcatgtaatccctgtctttacgacaaaccatacctttcattataaacaaaagaaatcactttatgccacctttattcccgttaattcaataatttttgccggttgcattggaaatcggcggcaagcgggattgaaacatagaacagccgggagcgtccggccccttcaaaacaaaaaaactgcgccggcagcctgtccgccggcggcagatcaagccgggccagacggcgattttccacccttatttcatcagcattctcgaaatgacgagcttctgaatttcctgcgtaccttcatagatctgtgtgatttttgcatcgcgcataaagcgctcgaccggataatcctttgtgtagccgtacccgccgaatatttgcacggcctccgtcgtcactttcatggccgtatcccctgcgtaaagctttgacatggcagaagcctttccataaggcagtccttctgattccagccatgccgcctggtaggttaaaagccttgaagcttcaatctccgtcgccatatcagccagtttaaaagcgatgccctgctgctcggcgatcggcctgccgaattgcttccgctctttcgcatacgccctcgccgcctcaaatgcgccctgggcaatcccgacggcttgagcggcaattccgtttctgcctccatcgagcgtcttcatcgcgattttaaagccttcaccttccccgccaaggcggttttttaaaggcacgcggcagtcctgaaagatgatttcggttgtcggtgatgaacggatgcccagtttcctctctttttttccgacagaaaagccggggaagtccttttcaacgataaaggcggttgtgcctttgtgtttctgttccggggcaaggttggcaaacacgatgtagaagtccgcgattccgccgtttgtgataaagatcttcgtcccgttcaaaatatattcatcgccttttttttctgcggtcgttttcatgccgccggcatcggagcctgaaccgggctccgtcaatccgtaggctcctatcttttcgccgcgggccatcggctttaaatattcctgtttctgttcttctgttccaaatgcataaatcggccagcccgcaagcgatgtatgggcagacaaggtgacacccgttgaggcgcagactttcgaaagctcttcaaccgcgatgacgtaggcgagatagtcgctgccgattcccccgtattcctctggccacggtatacccgtgagccccaattccgccatttttgcaaacagttccatgtcaaaccgctcttcctcatcccgctctttcgcagtcggctccacctcgtgatgggcaaagtcgcgcaccatcttctgtatcatttggtgctcttcactcagcttaaagatcatcctttttccccctttgacaccttataaatgtttaccgatgacgatccgctggatctcgctcgtgccctcataaatttcacacactttcgcatccctgaaatatcgttcagcgctgaaatcctttgtgtatccgaaatctccgagcagctgcacggcctctccggcgacatacatcgccgtttccgaagcgaacaatttggccattgaagcagctttccccgtctgcatgccttgctgtttcaacgaggcggcctggtagacgagaagcctggccgcctctgtcctcgccgccatgtcggccagcttaaaggcaagcgcttggccgttcttatacagctctccgtccggataccgtttttttagaaattgaacggcttcagaaagcgctccctcggcgatacccagagcctgcgccgcaattccgatccggccggtatccaggttggacagggcaattttgaatcccattccttcctcccccagcagctgccgggcgggaatgacagcgttatcaaaatttaaagtgaccgttagcgaaccgtggagccccattttctcttcattttttccgatgaaaaagcccggcgtgcccttctccacgataaaagcggaaatgcctcccgttcccgcctccggatcggttgaagcgaaaacaagataaatgtccgcggctccgccgtttgtaataaaaactttcgttccgttcagcacataggtatcgccgcgcttttcggccctagtttttagactgcccgcatcggaaccggcactcggttcggttaaacaaaaagctcccaagtactgccctgctgccagctttttaacgtagtgctctttttgccgctcattaccgtttaaaagaatgggaatggtgacaattgacgtgtgtacagatagaaccgcaccaagaacggcgcttttctttgacagctcatgtatggtcatcatataggtgataaagtcatgaccggccccgttgtacttagccggtatcggaagccccatccagccgcgctccgccattttcttcaaaagagaggttggaaaacggcctttttccatttcaggtacaaaaggagcgacctcctgtttgacaaaatcccttacaaccttctgcatgcgggtctgctcttctgtaaactgaaaattcaagctcacccctccttatgtcggctgcttttcatacgtataaaaccctctgcccgttttctttccgagtcgtcctgcgctgacatattgtttaaggagcggacaaggcctgtacttatcgtcgccaaagccttcatgcagcgtctccataatatacagacacgtatccagaccgatcagatcggcgagagccaacgggcccatcggatggttcatgccaagcttcatgattccgtctatgctttctttctcggcgatgccttcataaagtgcaaaaaccgcctcattaatcatcggcattaagatgcggttggagataaatcccgggaaatcccgcacctctatcggaaccttgttcatccgctccgccgcagccacgacggtttcatatgtttcgccgctcgtctcaagccccctgatgacttcgacaagctgcatgacgggaaccgggttcataaaatgcatgccgatgacgttatgaggtttttttgtgacggcagcaagttccgtaatcgacagggacgatgtatttgatgccaatatcgctgagtcttcggtcacttcatcaagccgcgtgaaaatgtctttttttacgtccatttgttcaacagccgcttcaatgatgagaaaagcttcccgcgcttcgtcgagcgcagccgacggagaaaggcgctggtagatttgcttcacatcttcatgcggcagcttgcctttttccgcctgtctgaaaagctggccggaaatgcgcttcattcctttttcaatttgttcaggtgatacgtcatacatgtaaacattgtatccggcctgggcagagacctgagcgatcccggaccccatctggccggctccgatgaccatgatcgtgtcttttttcatctgaaatccccctttttatacctcgatcatcacggcgtctccctggccgccgccgctgcaaatggcagcaatccctataccgccgccgcgccgttttaattcgtacataagcgttaaaatgattcttgctccgctcgcgccgatcggatggccgatcgcaatggcgccgccgttgacattgaccttctccatgtcaagacccgcgatctttccgcttgccaaagcaaccgcagcgaaagcttcattgatttcaaacagtttgatatcagaaagctcagctcccgttttgttaagcagttctctgatgacaagcccgggggttttcggaaagtcttttgcttcgactgcaattgatgtgtgcgctttaatgacggccggcgccttcacattgagttcctttgccttgtcttcattcatcacgataagtgagcatgccccatcatttacccccggcgcgtttcccgccgtaattgtcccattatggtcaaaaaccggggcaagctttgacagcctttccattgacgtgtcgcgccgcggtgcttcatcttgatcgaccgttaattcgccgccccgcttctcttggatgctgaccgggacgatctcttctcctagcgcgcctgaatccgcagcgtgtacggctcgcatgtggctcctgagcgcccaccgatcctgctcttccctagcaatctccaactctttcgcagcggcatttccgtaggagcccatgtgaacgcccgtaaatgagcatgtcagcccgtctgcgatcatcaaatctttaaccgccccgtctcccatcctcagcccccacctcgctttttgaagcaaataaggggcgtttgacatcgattccatacctccggcggcaatgacctccgcatcaccggccctgatgatctgatccgccattgtgacgcttcttaaacctgaagcgcacactttattaatcgtttccgttttgacgtcccacgggagtcccgcaaaacgcgcggcctgcctcgacggcagctgcccctgtccgccttgaagtacggagcccatgatgacttcatcgacatcctcaggatttacaccggaacgttttaatgcctcttttacggcgattccgccgagctccgcagccgtctttgactgaagcgcgcccccgagttttccaaaaggcgtgcgtgcgccgcctgcaataactgatctcgccacctgacatcctctccccttatcatgatttgtacataccgaagataaaagaaggcggagatccggctcacaccttctttatttaaaacctgaaatccgtctatgaggcatgttctttttgctctgacccgaatacggcgcgttcaagcagctccgctacatcatacgtgccgacctgatcctccaattccttggcttttgttccgtcgccgagcatcgtcaaacagtaaggacagcccgagctgatgacagaaggtgatgtgctgagcgcctgctccgttctggcaacgttgatcctcgcgcccgcctcttcctccatccacatgaggccgccccccgctccgcagcacattccgttttcacggctgcgctccatttccgctaaacggatgcccggaatggagcggagaatagcgcgcggcggatcgtaaacctcgttgtagcggcccaaatagcatgaatcatgaaaggtgacggtttcgtgaaccggaaactcaggtttcagctttccttcttcaatgagggcagcaagaatttctgtatgatgataaacttccgctttcagaccaaaatcaggatattcatttttgaaaatattgtatgcatgcgggtcgatagttacaattttttgaacatcatttttttcaaattcctcaatgttttttgcagctagctcctggaataaaaactcgttgccaagccgtctcggcgtatcgcctgaatttttttctttattgcctaatatcgcgaacgtgaccccggcttgattgaggaggcgagcgaaagccatggcgatcttctggcttctccggtcatacgatcccatcgacccgacccaaaacaggtattcaaaggactcgccttttttcttcatttcttttactgtcggcacctcaacatcgtctcttatatcacgccagttttcacgttcttttcggtttaatccccaagggttcccctgcctttcaatgctcgtcatggcgcgttgggcatctgcatccatttttccttctgtgagcacgagatagcggcggagatcgatgatcttatcgacgtgctcattcatgaccgggcactgatcttcacaattccggcatgttgtgcaggcccaaatttcttcttctgtgatgatgtcgccgattaagctcgggttgtaaagttctgaagcagccgcttcccttgacccttctccccctgccgccatggccagctggttgcctttcgtatgctgaaagagcggtgcgggtacccaaggcgttctcgatgtcactgctgctcccttttctgtcaaatggtctctgagccgcaaaatcagatccatcggcgaaagcatcttgcctgttcctgtagccgggcacatattggtacagcgcccgcattccacgcatgcgtaaaggtcgatcagctgggactgcctgaattcctcgatccgtccgacgccgaacgtttcttttgtttcatcttcaaaatcgattttttgaagctttcccgggtttgtcagccggctgaaaaatacgtttgccggtccggcaattaagtgggcgtgctttgactgcggtacatagactaaaaatgtcagcaggatgagaaggtgcgcccaccacgccgcgtagaacactgccgctgaagcggtttcccccataaagccgaaggcaaaagcgatgcctgatgccatcggttcgtgccatgataatgaatgttcatgccagatcatgttcataccgtttccgagtaaaacggtaaacatcaagccgccgatcagcatgagcacgatccccgacttaaaattgcgcttcagcctgacgagtttttctatataccgcctgtgaaaagcccagactaccgcaattaaaatcatcagtgtgacgatttcctgaaaaaacgtaaacgccgggtagacgccgccaagcggaagaccttgatcaggaacgagccctttcaaaataaaatcgatcgctccgaactgaacgagaataaagccgtaaaaaaacatgacatggatgatgccgctttttttatctttaagcagtttcttttggccgaacacgttctcccatatcttttgaaggcgctccttcgtccgcttatcaaaatcctctttttgtccgagcctgatgtaactgattctcgttctgatcaaatagacgaacagataaacggcgtaaacggttacacctaaaaacgcaatgaaattcaacgacagcaagacattcatcagctgctccccctttcatttccccaaccttaaatccccttgaactacctttatcttaaataatgaatgagtgttcagtcaatatattttcataaatgcaggaaaatagggggacactattctttacacgaaaaaagggagtgtcttcattggtgccgcttatgattatggtatgttttctcatcctgcttcttgcgctcgatttccattttggccgcaaagcctttgagaagaaagcctacgagcccgttttttcagagaagaaaagcgatattgaactgattcataatggagaagacttgtgtgagcggctgctggatgacatccgccaggccgaatcgtcggtgcatgtcatgttttatattgtgaagaacgatgacatcagccttgaatttttgaaggtgctgaaggataaagcgaaatccggcgtatgcgtacgattgctgatcgaccggatcggcgcgatgaaggtgaagaaaaaaacgctctccggcctgaaacaaagcggtgtgcacgtttttttcgccaacaagccgggcttcccctatttcttttaccggctgaatgcgaggaatcatcgaaaaatcgccgtcatagacggaaagatcggctatgtgggcggatttaacatcgcgaaagaataccttggtaaaaaagcggaattcggaccgtggaaggattaccatttgcgaatgacgggagaaggcgttgccgacttgcagcacatttttatatcggacttcaaaagagaagcgccgcaggcaaagccggccaacagcgtatttccgccgctgcagcaaggagctgtcacccatacaacccatgcgacaaagggattttctctagaggaaaaatacatttcatttatcgaacaggcaaaagaaagaatcatgatttgcacgccgtactatattccgagcccggctttgcagcaggctgttctctcagccagggaaaggggcgtgatcgtgtcggttctcgtgccgatgaaacccgatcatccgcttgtcaaagaggccgcctacacgcactttccagcccttttaaaagcgggctgctatatttaccggtactacagaggcttttatcatgcaaaagcattaatcgtcgatgaccggcatgtgatgatcggaacatcgaattttgacaacaggagcctgtttctcaatgatgaagtgaatgtcgtcatccatgataaagactggacaaagcaattcttcgacgtcgtcaaggaaagcattgaacacgccgagcttctgacaaaggagcggtatgcgaagcggccggtgatgcagcggcccgtcgaatggctggcgaaatcgatttcattctttttataaaacgtacgtttatcctgcatgacatgcgggtaacatttcaccaaagtgatgattacatacggaggggatgtacgatgaaccaagcagagtcgattaaactccgcgcccaatcgatgacgttaaaaaacttgattgagctgtacaagctttgccgctcagccagacatcagctatatatatgctcaagaaaaacgatgtgcaaaatcaaagatttaattgagctggaaatgttcagaatggccaatcgcgaaaatgagtgcctgattgtcatcgaagggaaaatggcgcaggaattagtaaaaaaagcacaatcgattctttctgacgctcaagttcaataagggaaggcggaagttcttcctttgcgagacgcctcctcaccaaatcaagaaaaaatcccccgttcaatggacgggggattcgttttacattttttcaggcgctgatacgccgatcagcttgagggcattatttaatgtgatttgcgttgctttcatcaatgataaacgggcccggcttttttcttcatctgccggatcgaggactttctcagcattgtaaaagctgtgaagcacagatgccaattcaaaaatatagtttgtaatgcggtgcggaatccgcttctctgcggcatcagcgacggcctcagggaacgagccgatcactttaagcagatcatactctttctcagaaccgatcttcgtaagatcaaggttcccttcaaaagaaatgcctttttcttcgccttggcgcagcatgctgcaaattctcgcatgggcgtactgcgcgtagtaaactggattctcattagatgttgagacggccagatcaaggtcaaagtccatatgggtatcggcgctgcgcatcgcaaagaagtaacgcacagcgtcaaggccgacctcatcaataagatcgcgcattgtgacggcttttccggttcttttgctcattttcattttttcgccgtttttgtaaaggtggacgagctgaatgatctcgacctcaagcgtttctttgtcataaccgagcgcttcaatagccgctttcatgcgcgggatatagccgtgatggtctgctccccatacattgatcagcttttggaagccgcggtcaagcttgtctttgtgataagcgatgtcaggcagaagatacgtgtaggatccgtcttttttgatcagcacgcggtctttgtcatcgccgaacgccgtcgagcggaaccatgtcgctccgtcttcttcatagatatgccctttttcgcgaagggcttcgagcgcctgatcgatctttccgttttggtaaagcgatgtctcagagtaccagacatcaaatgggacacggaaattctccaggtcttcacgaagtttgcccaattcgtactttaagccgtattcgcggaaaaacgcgaggcgttcgctctcttcttcatgaacaaaacgatcgccgaattcgtcggcgagcttttggccgatttccttaatatcttcgccgtgatacccgtcttcaggcatcggcttatcttttccaagcgcctgaaagtaacgggcttcgacggataacgcgaggttgttgatttgattgccggcatcgttgatataatattcgcggctcacttcataccccgctttttcaagtacattgcagagggaatctccgacagcggctccgcgggcatgtccaaggtgcaggttgcccgtcgggtttgctgagacgaattccacctggacgcgttccccgcccccgatatttgtttcaccgtaggcctctcctgcttcaagcacagccggaatcagcttcgttaaatattgattgttcatgtagaaattgataaagccaggtcctgcgatatcaagtttgtcgatcgacgcttttcctttgtcaaaggatgcgacgatttcttcggcaatattccgcggcgcttttttggcgattctcgccagctgcatagccatattagtggaatagtcgccatgcgacttgtctttcggaacttccagtacgacttctggaatctcgctttcttcggcgaggccggctttcatgacagcttccttaatttcctgcttcagcacatctttcatttgttcgactatgttcatgactcgtgtcctcctctatacgaaatcgacatcttatgtaaatgcttttgttcatcgcttacaatcatatcgtactcaatgctgatctttccgtccggcggctgatgtgtgactgatacagctttagtatccacgccgagctcgagtctgccgaatggcattttataatgagtgacggtgcggctgcccggcctgaagcgctgtttcatttcgatggcgccggaacgcatgaccagaacttcgttttcacttgccttgacgatcgtcttcacctttccagcatcatgctcttcatgataagaaagatatattttatcttttttcatataataaaatccagttgtccggaactcgatcgtctccgtgtccgatccttcccggataacagatttcacatagatatgaacgggtgtctcctgatccattccgacacttcctttttcgatccgatttgacttgattagtataatcattcgggaaaaaaagttcaaccgcagctcctttatatcatcttaacagaacggacgggaagataaaccattttctaagaaaaaagccgtcctgaaaaaaggacagcctgttttatttcacccagccgagcagcatttcgcgaatcagcttgcttgccgtatttgcggtttgttccgaatggtcatagacaggagcgacttcgacaaggtctcctccaacgacattgacgtctgagcgggcgatttcgtgaatcgaagcgagcagctctttggatgtgatgcctccggcgtcaaccgtaccggttcccggcgcatgcgcgggatctaagacatcgatgtcgatcgtcacataaaccggacgccccgcgagtttcggcaggacggctttaagcggctcaagcacttcaaatttagaaatgtgcatgccgttttcttttgcccattcaaattcttctttcatgccggagcggatgccgaatgaatagacattgccgggtccgatcagttccgcggctttacggatcggcgtcgaatgcgagagcggctctccttcatagtcgacgcggagatctgtgtgcgcatccatatggatgatggcaagatcgggatattttttgtacatcgctttaatgaccggccatgaaacgagatgctctccccccataccgagcgggaattttcctttatctaaaatgctgtcgacatattcttcaatcatgtcgaggctcttctgcgggttcccgaaaggcagcgggatgtcgccggcgtcaaagaaatgaacctcttccagctccctgtccaaataagggctgtattcttcaagtccgatggacacctcgcggattctcgccggaccgaagcgggagccgggacggtagctgaccgtccaatccatcggcatgccgtaaaggatggcgtccgcctcttcccaatcggggcggcttgcgataaacaccttgccggaatatgcttcatcaaatctcatcttcaaaaacctccctgaaaaaaagcgcagaatgccatcctgcgccaaactgttttatttgattaaatcgctgacgaatttcggaaggacgaatgccgctttatgaatttcttttgtgtagtatttcgtctcaatatcaaagaagcggctgtcctccacttcaagaggatcgtattttttcgaaccgatcgtaaacgtccacaatccgcttggatatgtcggaatgttggccaaatacagctttgtaatcgggaagatctcttttacatcgcgctgaacgtttgtgatcagttcaggtgtaaaccaagggttgtccgtctgagcaacgaaaatgccgtcttcctttagcgcttttgctatgccggcgtaaaagccttttgtaaacaagttgacagcaggccctactggctcggttgaatccaccatgatgacatcgtactcattttcagattgggcaatgtgcatgaagccgtcatcgacttttacttcgacgcgcggatcgtcaagtttgcctgcaatggaaggcaagaatttcttggaatattcgatcaccttgccgtcaatatcgacaagcgtcgcttttttcacgctcggatgcttcaaaatttcacggataacgccgccgtctccgccgccgaccacaagcacatgctcaggattcggatgcgtaaacaggggcacgtgcgccaccatttcgtggtagacaaattcatctttttcagatgtcatgaccatgccgtccaaaaacagcatgttgccgaattcttcagtctcggccatttcgagcttttgaaaatctgtctgctctgtatgtaaagtcctgttgattttcattgtaataccgaaatttttcgtttgcttctctgtataccaaagtccgctcaaagcgtcatcttcctttcgtgataagctgtatttcaatctatttttctcgcctgcggcggcgattattctgcactgaagcatcggcttttgcctaaggaaaaagtatagaggaattgcaggtgattgtaaagacggatcgattcattttcaggagtcattccaagtccattatattcccaatcgccgatttttcttttataatggctaagctaagcacagatgtgcatactgtgcgcttttggaggtgttctcatttgcagagcaaacaactgctcaaattgtatataaccagccgccggaaaaggtttttattgatattttttctgatcggagcggccgttttgtttttcagccccgtttatatccgggaggctgccgttccgtctttgccggattggcttctcgaagtcagcggatctgtttatttgatgcatatggtcgctgtcctgtccgcagcctgtttgttctacggcacagcgaatggatgcggcgttcagcaggtgcaattgcaacaaacagaacggtgttgccgttgattttgctcggctgcaccgtttctgcttttgtgatgatctgcctgctgttttggagtgcggccatcggctggtttacattcggcggctacggtgcggagaatgttcatcctttttttgagctgtcgggttctcccctctggtttgttgtctcacgcctgttcattgactggtggtcgctttgctttctgatttttctcggcttggcgggagtgctgatcgcaaagaaagagcagcttgctctatggctgccgcttgcgtggtcctcgggtttaatgctccttttcaaattcaatatatcctttaaagggctgctcccgggggaaggcatgctgttgtccatccatgcagcaggagcttccccgattctggccgcatcagtcagcgaaggtgcagttttcgtattatggctgatttcatatgtggcgaccgccaaaaaataggattcctcatattgctgtcttaatctccgcagagggtctgccgttttttccttcccgcttgtttaaatcctcctctttttcctcataatgataagaacattttatttatccgggaggagatttgaacatggacataatgacggacaagcgggtccgtttaaccatcaagacgatacgcgcatttttgttcatgggagcattgatgctgatcttcctttcaatcgttgtcatgacggtggtcttggcggccaaatggcaaggcgctccttcgattcaggtgccgaggtctaccgtgctgtatgacggaagcggaaagcaaatgggggaaacgcattacgggcaaaagcggtactgggtttcgctgaagaacatcaatcccgcagtcatcgatgccacgcttgccgttgaagaccggaactttttccggcaccacggctttgactatatgaggatgggcggcgccctcattgccgatttaaaggcgatgtccaaagttcagggagccagcaccatcacccagcaatatgcgagaaacctctacctcggccacgataaaacatggaaaagaaagtggaatgaagctttttatacgataaggcttgaacaaaactacacaaagaaagatattttggaaggctatttaaatacgatttattacgggcatggagcatacggaatcgaagcggcttcccggctgtattttggcaagcgggccaaagatatcaatacggcggaggctgcaatgcttgccggcattccaaagggtccttcagtttattcgccctttgtcaatgaaaaaaaagcgaaagaacgccaggaaatgatcctgacaatgatggagaaacaaaacaagctgacggaaatgcaggcggcagcactgaaaaaaatgccgctccgctttgaaaaacagcaaacaaccgaaaaaaccgctccgtacttttatgacgaagctgttaaagaaatttcgcgattgctgcgtttgacgccggagcaagcggaaacaggcggctacaacgtattcaccacgctcaacccgcgtctccaaaaaattgccgaggatacgatcgaacacacgatagattcgtcatccgacattcaggcgggatttgcagcgatcaacccgtccgacggcagcgttctcgcgcttgtcggaggacgcgactacgaaaaaagcccttttaaccgcgtaacgcaggctatgcggcagcccggctccaccatgaagcctttcctttattattcggcggttcaaaacggctttacaccggccacccgaatgaggagcgcggaaacgacatttgagctcgggcaaggcagcgcttattccccgagcaactatcacggctattatgcagacggtccgatcacgcttctgcaggcactggctttgtccgataacatttacgccgtgaaaacccaccttttcctcggcatggacaaactgattgatgccgcaaagcaattcggcatcaacagcccgctgcaaaaagtgccgtcgcttgcgctcggaacatcccctgtgaagccgattgaaatggtgaacggatacgccatgtttgccaacggcgggaaaaaaatcgaaccttcctttattacgaaaattaccgatccgaacgggaaggttctttatgaaaaaccgaagcggagcaaacaaatccttgacccaaaagcggcttttatcacggcgaacatgatgagcgggatgttcgacaaatcactcaacggctatacatctgttaccggccggacgatcgcagatcagctgacgcgccgatacgccggaaaatcgggaacgaccagcaccgacagctggatgatcggcttttatcccggtcttgcttcaggcgtgtggacgggatatgacaaagagcggacaatcgatgccgtcgcagagaaaaactatgccaaacaaatttgggctgagtttatggaaaaagcgcttgaagacgcgcccgccgcagctttaatgccgcctgaaggcgtgaaagggatgtacatcgacccggctacaggttatgcggcggcgcccagctgcccgtccaaatatttcgcttattttatcaaaggtactgaacccgagcaggtttgctatggaaaggaaatctataaggagcaaaacgccgggcacgaaaagcccgccgctcccccccataagcggcaaaagtggtgggaaaaatggtttaaaaaaggagaataaactttttagggggatagacgaaccccccggacttcatggcagtccggggggtttttcctattgctggagcagtccctttttcagctcgtctgatgaacggtcccaaagcccttgatcatggtttttcagaaaatcggcaagaacgcgcttagaaccttcatccatatgctcgacgataatcttccgcttcatcgacttatccattaaattgacgtgctccggaagcgatttgtagccgcggcggatgcttctgtcgaccgtcatttcgcatgccgtcacacccgcataataagggccttcttccctgcggtcgatcgtaacccacacaagccagtaaggttttccgttcggcacctcttctttgttcggcaaaaatttgattcctttttcaaccgtgctgcgggcgtgcatggcgccgatatccacaaacgcttctttctcttcaacatcgacaatgacaggcgagatgttgtcaaggcttaatgcgcctgctccaaatcccccgtgtccgtctgtcggatcgcttttaataatgttgaatccgattgtttttttcttttttccttgttccatcaaaaatacctcctacatcagcggccggaaaacgctgttaaatatcgatatgatcaattcccgcccgtcattcaaaaacggccagaatacatattggccaagcggtgtaatgacgataatcagaaagacgatcgagccgtacgcctcatatttcgacagcttcgcccgcacttcgggggcgaccacatcctgtataacccgaaaaccgtcaagaggcgggaacggcattaaattaaacagaaataaaagcaggttgagattcacccaaatcgtaaaaaattgaagcaaaccgctgtaaaaaccggcaggcagcgtcccggacagcttcacggacaaaagcagcaatataaaaccgatgaaagcaaggatcagattgctgatcggtccggcgattgacacgagaaatccggccagcctcgggtttttaaaataaaagcggttaacgggcaccggctttgcccagccgaatcccaatataaagatcaaaatcgttccaaacggatcaagatgcttaagcgggttgagcgtcagcctgccctgccgtttggccgtctcatcgccgaatttgtaagccacatacgcatgggcgacctcatgcacagtgaatgcggcagcaagtgtcaaaacaacatacggaatcatttccagcggataaataagaaaacggtctaaaatgtggctttccctctttctcatatacaaagatttactatctccagtatactataagagaacctgatgctaaagtgagcagccattttttaaaaggaggaggagaacatatgccatacgtaactgttcaaatgctggaaggccgcacagatgaacaaaaaagaaatctcgttaaaaaagtgaccgaagccgtctccgaaacaacaggcgcacctgcagaaaaaatcgcggtcatcattgaggaaatgaaaaaggaaaactacggtgtcgccggcaaacgaatgagcgatatgtaaaagaaaacggcgttcgccgcttacgcgcgggacgccgtttttattatttataccaagctttgtttttagtgatctggctattgtgagctgaatcccaaacatcgaccgtgtatgcgtagtcgtagttcataatgcagcggattccgcttccttgcgcatcgtggttcaagccgaagttatgggaaaattcgtgggttgcagcttttgccgtgttggccgttccctggtcgaggtttacgctgaaggcgctgccgttcggcttgctgttgtatacgtatgcgatgccgccggcgtcaaaattactgttcgccgtaaatccgacgacgaatttatagctgcgcccgctgaaattgctctgaaggtttgatagaatttgagagctgttgctgcctgaagaggtccaaggcgccacagcttcgacgacaaaatcaacatcgtgatccctgttgaacatgacatccgcctgctcaataatttggacgattcttgtctgccaatcgctgtatttcgcccgatactgagcgtcagccacggcaaggacgctcactttctggcttcccgtgcctgcctgggttgaaaacgaccctttgcccgtattctttttaaacgttttcgttcccgtcacatttcctttctcatccagtattttcgtattgaccgttctttcaatttgaacttttcctttcaagtctttaaaatctttcgctttaggcaaagaatcaatataagttcctcttgcttcatgatcgtgctcgtgctcatgcccgcccgtcttggcggcaccggccgtcacaccgggaatgagactgacggaaagtaatagagataagaataaagaacgtttcttcactgcaaaacccctccttattttttgaacgaatgaaaaattctgctagttatcaaaaaattccttcaattcatccaaaaagaggaaatattgcatacgttcttttcactgcttctttcaatttccctacaaaaattccaaaacgcagacaaaaaaacaaaccaaaaaacctaccgtttttcggcaggcttatgaacaaagatttctgagcttttttatgtaagcgacggcttcatcgaattcttcgtccgtataccgctgtttgctttttacggtaaacactttttctctaatctcttcctgctccagcccctcaaaatacaaaatcgtcgacaccagttccaaaaaacgcgatgactggccgtttacgtcgtctaaataggctttaatatcccgcatatccagctcacactggctcaaaaactgctttcccgcttcagtgggtgaatagcggtattgataatagccgccctttttttctttgacttcatggagaaatccgagattgcaaagttcttcgacttgaagcgtcagctcctctgaataaggcccgtaaaaatgaaaatcatacttttcataaaaaggaagctccaatttctttgcgatataaatgattttctgcagctttttccgcccgacaatctcccccgaatccgagaagaccttcatcagctttgcatgttcttttaacaaatctccgccatctccttcatccttttctttctatttcagtccgagcaattctttcattcttttcgcatgacggccgtcaggcagcccttcgattaaatcgagcgggaaatacagcttatggtccgttctccgcttgcctgatatcgcatcgacaatatcggactgccgcgacagctccttaatctggccgttgtgcgtcagcaattgaatcgggaggcgttcctcttcttcccccggtctgtagaaatcataaggaagatctgaggacgaatccaccacaagataatattcgggatcaatccctgattctttaaacaagttggtcagttcaaagtaagtcgccatttcctcattcggattgaattccgcatactggaacagcctgcggttgataaaacggcggcataaatcagacaaaatttcgtcctcttctttttcccaggcctgaaaataataaagaatgattgattcatcaagacttaaataatcttccaatgtgacattgccttcaaaaatagaataaaaatgcactggcgcatgcgtgaaaacatagccttcctcatgaagctgctttgcacggtgaagaatcttcgtcaaaatcacttccgcacttcttgtcacaggatggaagtagacctgccagtacatctggtaccggctcataatatagtcctcaacagcatgcattccgctttgcttaatgacgatttggtcttcgcgcggccgcatgacgcggagaatccgctccatatcaaaatgaccgtagctgacgccggtgtaataggcgtccctctgaaggtagtccatgcggtcagcgtcaatctggcttgagatcaggctgacgacctgcttattttgataggttttcgcgatgacttcagcgacatcctttgcaaatgtcggacttaccttgtttaatactcggttaacttctgtatcgcctaaaatgatcgctctcgtaaagtcttcatgatcaagccggaagaccttttcaaacgaatgggaaaacgggccgtgccccaaatcgtgcagcaatgcggcgcaaaggcacagatcgcgctcgctgtcatcccattcctccctgcctttaaaaacgtcatcaaccattcttctgacaatttcatagacgccgagagaatggttgaaacggctgtgttcggctccgtgaaacgtcaaataggtcgtcccaagctgtttgattctgcgcagcctctgaaattcgcgggttccgatcaagtcccatatcagcttgtcccgtacgtggacatagcggtgaacaggatctttaaacactttttcttctgataattttccgtttggatacgccatttttgtccctctttttttcaaacgtgaggcaaactgatcgctgcccatccgtctctttttcttcggaaaactaaatgtatattgtaagtattgcccgatctgcttgttttctttaaggtctgcttctattatatcgagtctgtttttttgaaaacatccttgaatttacccggccatttgttccagcctgccaaaaagccgttaaacaagcaaaaacgcctgacccgttagggaggcggttattttttgagtttctttttcactttttcgatcagctcgtcttcatcaggagctgacagcggacgattattgacaaacgcaaacgatttttttcgtcccggcccgcagtaagactggcagccgatttccacttttgcatccggatcaatttctttcagacggggcaaaagcgtctttaaattggtggcctggcaatcgtcgcatactcgaaattcattagccatttcatacgcttcctttcgttttgttcatctgtctttatgaaaggcattcaactgtgccgaacttttataaaaaatgacaccatccttcattttacaaggattctttcattcctgcaaggatcgcgctaaaaaaatcagttcctattcttttagcaaacttgtataaatattttccaaaatggacaatctaataccaatactgacaatgggagttgagaagtgatgaaacaaagacaagacgcttggtctgaggaaaatgatttactgcttgctgaaacggtattgcggcatgtcagggaagggagcacacagctgaacgccttcgaggaagtcggagacagactgaacaggacatcagccgcctgcggttttagatggaacgcagttgtccgccaccaatacgaaaaagcattgcagctggctaaaaaacagaggaagcaaagaatgcgcgccctcggaaacggacagccggcgaaaaaacgcttattatacaagccgccggtcgaaacgaatgctgaacctcctgcagaaagcgttgttgagcagaagaaagcaaccgcagattcaagcgaacagcagccgatcgccagcgagcatctgccttatgttgatgagagctttaaagaagagttagctagtttatctcaccttctatcgccaaatcagccgcaggccggccatacagccgatacatcgaaagacatgacgatcgatgatgtgatccgcttcctgcaaaactatacaggaaacgaagaacaaactgccgctttaaaaatggaaaatgaacgtttaaaacaggaaaacgaagaactgacgaagaaagttgaaaagcttgaagcggaagtcaaaaagctggaaaaagaccagacaaccatccaggaagactacgaaacgctcgtaaaaattatgaaccgtgcaagaaaactagttttattcgaagaagacgaacacgctgcgcccgccttcaaaatggaccggaacggcaatttagaaaaaatggctgaatagcgctctcagaggatgcggcagagacgttcaggcagcaaggactgacaatgcatacaaacatttttcgatacgaggatacccctttctttaaaaaagggggtatttttacctttctgcggcttgcttttatatgacaaaaatttcataatagggatagcaattcataaggcggggtattcgatgaagtttgttttatatgcggttcagttcggcactgcggcccttttgtttttgttttctgcattggcaagctggtatcaaggcagcgagcttttaaaggtgccgtgggagtggaaatatacagccaagtttacaagttggctgtacggagaggactccattaaaaacgcacataatatttcacagcttgattttttcgtctatgcggccaagcatacgccggcaaccgttattttaatggccgtcagtttggcgtatatcatcgctttggcggcttatcttctcatcaaaacatatgtaaaacgaaaaagcgcttcgagcgcagcataaaaaaaccgctccggaagcggtgaggtgtggcaaaatcctaaaacgttcaaccgttttaggattttgccgtctttgaagcattttacagcccgctggtttttcaccgctttaagcatgcctgacaacgaatataaaggcggcggaggctcttcttctatccaaaaaccttttcattccgttcaatcatgcggacaaggtttttctcatacacttcctcttctgcgggcgtgagagggccttgataaatctccccgcccagctctttcagctgtgtcagaagcaagagcatcaagtcctgcaccgaaatgtcttcattgagaagctcagaaagcgaagccatcgtttccgggcgaatatcgggataaacggcttttgttttcccgcgcatgtctttcaaggcggtgtcgtaaaagcgtttgatcagctcagcgcgcccgcttccgctttgatcagcgcacaaataaatttgaacagccactccgcctctcaggcgcctctgggaaattcccgcaaatttccttcccccgatgctcaaatcaaagcttcctggacagtaggagcctttgatttcataggcttcgattgctgcgtcataggatgacagcattcgcttaacgagctcaaacatcgcttcatagcctctgtcgatatcaattccgtttttcttatcctgaaaaatcagggaaacgtttaaaaccccgctgtccaaaacgacggccagtccgccggaattgcggacgatggcttgatagcccgcttcttcaagcaatgaaatcccttcttgtaaataagggagccttgtatcctggattccgagcacaatcgtgtcatggtgcacccaggaacgcgcggtcgccggagataaacctttcccgacagaagcgcacagcgtatcatctatcgcaaatgattgttttgcatcaaaatatgggccgagactggattggtcaatgattctccatttcggctggatgagtagatcaatcggttgctttgccatatatagtgtaaaccctttcgttttgcatttcagccaacatccattataccatttacgaaaacatgtggtggaaattttcttatctccggcgcttccttcattcaagtgacgcttaaagacggttctccgaattcaagcggcagcccgacgtaattctcggcaagactttgagcggccgccgttgaagtcgtaacatggtcaagttcagccaattgaatctggtagtcaaaaggggtgtagccgtgatggcgatgcagcagggatgtcatataccaggaaaagcgttcagctttccagacgcggcggaggcaagactcagaatagccggccagccgttcgattcttccggtttcgtaatagtcttcgagcgcccatgcaagccgctggacatccgccatcgcaaggttcaggcctttcgcacctgtcgggggtacaatatgcgcggcatcccccgctaaatagagtctgccgtattgcattggatcgcatataaagcttctcatcgagacaatgtttttttgaatgatcgggccttcagtcagcttccatccgtcatcggccgacagccttaggtgaagcttctcccatatcctttcgtccggccagttcccgactgaatctgcaggactgacttgcaggtaaagccgctggatttccggtgtccttgtgctgacgagggcaaacccgtcttcatgatgggcatatacaagttcaggcgaggacggaggggcttcagccaatatgccgagccatccgtaagggtacaccttttcgtactctttgcggatctccttcggaatgctttgtctgctcggcccgtgaaagccgtcgcaccctgcgatgaaatcgcagttcagttcttctgtatcgccgttttcattctgataagtgatgacaggcgcttctgtatcaatatttgaaaggcggacgtcagacacattgaaaacgatgcgcccttccgattgcaggcgggcggcgattaaatctttgatcacttcatgctggggatagatggcaatgtatttcccccccgtcagcttgtgcatatcaattctgtgccgcttgccgccaaagcgaatctcaattccttgatgaaacatagctgttttcatcatccgttcaccggcacctgtttcattcagcaaatctaccgtcatctgttctagaacgcctgcacggacggtctcttcaatctcctttcgcgagcgggattcgatcacaaccgcttcgattcccctgcggtggagcaggttagcgagcataagcccggcaggtcccgctccgataattcccacttgtgtccgcaaaatggtttcctccctttatccatgttttgatgtggcttctaatgtatacccggcgctttccgacttagagacaaaatcaaatgaagcgtgtttctcttggacgagcatgatgccgagtgcagcaaaaacactcgggatcgcgaacaccatgaaagcctgcttcggctccatgccggaagcaaggatcaatgcaaacagcgaaggcgcaatgatcgctccgagtctgccgaccccgagcgcccagccgatgccggtcgctctgatttctttcggataatactcagaaatataaggattggcgatattttgcgctccgacggtgcatgccccgcctaaggcaatcagcaagtacagaagaacggggttcatcgtcattccaaatgctgcaaaacaaaaggctccgatgacatacatagccgcaagcacatttttatggccggctttatctgccaaatatccgccgaataccgctcctgcggcttgtccgcagcaaagcgccaagttgaatgacaagcttgacgacagcccgtagcctgacgcctgcatcattttcggaagccatgtatttaagccgtaaaccatgagaaggcagctgaaaacggaaagccagaatgcgaatgtgctggctgcacgtttttgtccaaacagtttttttaccggaaagcctttcttttctttcgcaatcaccgagatttgataattgtcgtcttccctgtagcgtcccgccggatgcacctgattgaaaatctcagccagcgctttcgtctttttcttcaaaacgtaaaatgacagagattcgggaaacctgctgaaaaagaacgggagcacgaagagcggcacggctccgatcagatagagcactctccagcttgtcacgggcacggcgaacatgccgacgagggaagccagcacaccgcctgcagaatagccgcaatacatagcggctacaatcaccgctctgttttttttcggcgaatactctgtcatcagcgaaatggcattcggcatcaacccgcccattccaagcgcagcgagaaaccgcatgatcgtaaacaaaagcggagaatcgatcagaccggctgctgcagtaaacaggctgaacagaaagatacagaagcccaacacctttttgcggccgtattgatctgcgatcggcgaaaaaataagcgcgccgagcatcatgccgatcaatgtatagctcccgatcgctccggcttggatggcggtcaggctccattcctccatcagccatggcaggctgacgccgtacattgcaatatcataaccgtcaaaggcaatggcgaaaaaacaccacaggaaaacagtcaggtgcactttgttaaatttgctggccgccatgacttccgctggatgaactgaacgatttttcatgttcccctccacgattcttatcgtattatgaaagcagcttaacgcacggtatctttttcattgaaagcgtgcgtgcgagctttttgtcccgccggctcgaatgccatgacgacattggagctcccggaagactgaccgtatccgtaaaacgtgcttttacatccgtcctccagcacgcccaatagcattgcaatgtggcggccgccggcttcaagcccggcgtttttagcatattgaggcagcatctgctgagctgataaaagatcgttgtctgttaagtaggtcaaaaattgtgcatcgagggcctgttcggccaatgtcggcatacattccggccccctcaccaaatgatggcttagcgccccgctgctgatgaacacggttttctttctgctttctttcagcactcttccggcaagccggccccacaaatgcgtttcttccaggttcgcggccaatgtaaccgataaatcgataaccggaatatctccctttggaacgaggtagcgcagcggaacgaccgtcccgtaatcccagcagtaagctggatcattgacaggaatgacggaaagccccccttctctgccggcttcagccaattgcagcgccaattcagtgtccccggggtaagaatacggaacatcggaaattaaattcggacactccaaagccgttaaaacgccttgatggtcgggagctgcatcgatcagatggtcaaagcttgacgtccagtgacaggaaatcaggacaacggcatcgggctcaattctttcaataatcctggagagcctcttcatgcccttgaccagctctctttggaagtcaggggttttatcttcaaaacacatcctcggtgtatgcggaacaagcgccgccaattcgattgacatgtagattcctcccatcgccttctttaaggtcttaattttgagaccggtgtgccgcctatgccccagtggcttttagaaacttcggtgacaagaacgcggacgttttccttcggagagtctagggtggcgctcaacgtttccgtcacttttcgaatgacttcctcgaccttttcaggcggccggccttctaatagttgaatatgaacaatcggcatatcataatcacctcaggttatggcttgaccgaaaatgatacatctcccagcccttctacttgtgctgaaacgcggtcgcccggctgcagcatgacagctcccgttacaccgcccgttaaaatgatgctgccagccgcaagcttttgttttttccgggagagcatgttggcgagcatggccgccgaatttgcgggatgcccgacaaccgctgctccagtgccccgctctttgacctcgccgtttatcattaaagagactcttgcttcatccagcttgaaatcgtccggcttcttcactttttcacctaacaccactcttgaagatgacgcattgtccgcgatgacgtcaggcaaagtgaatgagaaattttcatagcggctgtcaatcacttctagaacgggaatcaattcagcaacggcttcaaggacctgctcctttgtaacacccggtccttcaatatcctcccccagcacaaaagcaatctctgcttcaaccttcgggtgaatcagctcgttcatccggatgcttccgccgtttggcacgatcatatcttcaaaaatataaccgtagatcggctcctcgacgttcatctgcttcattttcgcccggctggtcagtcccattttcggaccgatgatgctattgccatcccataatttaagctgaatcagctcttcttggatcgcatacgcctcttcaacggtcagctccgggtagtcctttgtgattctttcaacttcacgcttctctgtttcggcaagatacaagagtcgcgccgtatcttttaatgctgcggtattcatccgcttccccccttttacagcttgatgcaaatattggttaattcgctgaagaattcgaggctgtgaatgcctccttctcgtccgagtccgctctgtttcatgccgccaaacggcgtccgaagatcgcggagaaaccagctgttgacccacaccatgcccgattcgatttgcccggctacgcggtgcgcccggcggaggtcgttcgtccataaggtcgcgcttaacccgtaatgtgtgtcgttagcctgtgcaatcacttcctcctcatcgtcgaacggaatcaccgttacgaccggaccgaagatttcttctttgatgagcctggaattgcgtgaaagtccggtgataatcgtcggttcaagaaagcagccggattcctgtccttcagggcgttttcctccggttaaaatattgccgccttcccgtttggccaattcgatgtagttcatcacacgctctgtgtgttcagaagaaatcaaggcgccgatattcgtgtccggatcaaaaggatcgccgactttgagctttttcgttttctcaacgaacttgttcagaaattcgtcatacgcttccctctcgacatagatgcgggagccgctcatacatacttccccctggttgacgaaactcgatttcaatgaggtgctgacggcttcatccatgtcggcatcggcaaaaataatgttcgggttcttccctcccaattcaaaggaaagtttctttaatgttttcgaagcagcttccataatgactttgccggttgtcgtttctccggtgaaagatatcgcatcgacatcgggatgctcagaaagcgcagcaccggcggaatctggtccaaatccgtggacgatattaacgactccgtcaggcatccctgcatcatggcagatttccccgagaagggtggctgtcatcggcgtcagttcagccggtttgataacggctgtatttcccgccgccaggcaaggcgccaatttccacgtcagcaaaagaagcggcaagttccacggattgatcagcccgacgacgccgaccggacggcgaatcgcataattgattgcaagatcgtcagtttgataagcttccgttccggctcctctcataaaatccgcaaagaaatgaaagttgaaagcggcacgtggaatatccaaagtgcttgagagcgaaagcggttttcccgtatccaatgtctcaagcctcgccagttcgtctttacgctcaagtatgatgtcgccgacctttctgatgatccgaatcctttcgtcagcggtcatgtttttccagcgtccgtttaatgcacgcctggctgccgcgactgcaagatcgacctcttttttgcctccttccgcaacgcttccgataatttcctgtgtagccggattgatgttgtcaaacgtgctgcctttctctgaaggaaagtacctgccgtttatgtagtgctgacagtcaaaaggttttacgagtttttccgatggagtttgaacattcatattctgcaaacatcctccttttcaaatcctttccattaaattaaaggattttaactgacaagaaaacagcaatgttcctctatgcggaacaaatcagacattttttccgaaaatttgatattttccgcttttttattttttatatcgtgttatattatggaataaaaggaaacaaaaacaagggagagagttgaggaacctatgactgttgagacgaaggaccaccagctgctcggttcagtaaaaaatgcgcttcggctgcttcaatcgtttaccttagacacaccggaaaagaaactaaccgaactcgcctcgtcgcttggcctcggaaaaagcacggtctcgcgccttttgtctacattggaaagcgaagggtttgtcatgaaggacccggaatccagaagatacaagctcggcttatcggtcctgcagttaaacaccattgtcaactccactcttgaaatcaaccgcgaatccctgccggtcctcaaacggctgaccgatgagaccggcgaaacgtcgcatatcgcgatgcgccgcggtctcagcgtcgtttatctcaatcggacggaatgcccccgcccggtcgaacttctctcatatatcgggcggcaaaacccgatgcactgcacaagctcaggtaaggtgcttctcgcctttgatgaagagggcatattggacgagtatgtgaaggaaggcttgaaaagctgtacgaaagaaaccattacagacggggacaaattgagggatgtgctgaaaaccgttaaagaaaacggatttgacgtcagttgcggggaattcatagatggtgtcacatcaatctcagctcccgtcagaaaccacgcaggtcgagtgttgtacgccgtcagtgtcgtaggccctgcaaaacgcatcaaggcccggcaggcgaaaatcatttaccaagtgaaacaagcggcccgggatatttccgaaaggatcgggtactggaaacgaatataaaaattgggggaatcagctttgtatgatcttcacacgcactttataccgcgcgatgtgctgctttggctggaagacaatgaaaagagagtccacgctgtccgcgaaaaaaaggctggatgccaagcggagtttttgacggtcaatcacaaatggggctttgaattaaaagagcttttctaccaggaggctttatatttggaagcccagcaggaggccggcgtcacacactcattggtatcgccggttccccagcttttcctttacgatctcgccgaagaaatcacggacgaattatcttttgtatacaacaaagcgcttgccgaatgggttaaaaaatacgacggccgcctctcgggactcggcacagtcccgctgaacagcccttcaaaggcgagcgagcgcctgaatgaagcgatgaacaacgggcttaaaggagcgattatcggacccggcgcttcgcaactacttctctcggacgaagcatttacaccgttttgggaaacggctgatagaagaaaagcgattatctttatacatccgctcctttctgaagatccgcggctccgccgcaggatgctgccaaacttgatcggcgttccgtgggaaacgacgatttgtgccgcagaccttttgttaagcgggtttacagaccggtttcgcaatgtgaaaattcttttggcccacggaggcggctttttgccttatcagatcggaagactgaacaaagggtatgacaaatgggccggcgtttcttcatcgctttcggctccgccgcgcgaatatttgcggaagttttggtttgatggtgtgctatgggagcaagaaagcgcggcatatttgaagaagcttgtcggagaagaccgccttgttccgggttccgattttcctttcgacctttgtcagtggccgcctctcgatcccggccggaaaggagcggagtctctgctgaatgtagcgattgaagcataaaaaaaggcgaacctcttcaggttcacctttttcaggaagcctattacagagcttgagccgccgtaatcagcgcaagattataaacgtcctcagcgttgcaccctctggacaggtcgtttacaggcatgttcagcccttgcagaatcggaccgaccgcttcaaagttgccgaggcgctgagcgattttatagccgatattccccgcttcaaggcttgggaaaacaaatacgtttgcatctcctttaatgacggagtccggcgcttttttctcagcgacagacggaacgaatgccgcgtcaaattggaattcgccgtcaagtgtaagctcaggcgctttttcttttgcgattgcaaccgcgttggctactttttcagtttcgtctgattttgccgaaccttttgttgaaaagctgagcatggcgacacgaggttcgatgtcgaacattttcgctgtgttcgcactttcgattgcgatttccgcaaggtcctggctgtcaggcgcaatgttgatcgcacagtctgcgaatacgtactgctcatcgccgcgcgccatgataaagacgcctgatgttttcttcacgccttcttttgttttaataatttgcagcgccgggcgaaccgtatccgctgttgaatgagccgcaccgctgacaaggccgtcggcaagccctttataaacaagcatcgttccaaagtagttttcgtctaaaaggatttggcgggcctgctcttccgtcgctttgcctttgcggcgttcaacgaaagcctgaacaaggtcttccatcccttcatatgtatgaggatcgtatatgtcaacgccatccagcgttaaattcaacccgtttgctttatctttgatttcctgctcgtttcctacaaggatcggctttaacacgttgtttccggccaatttgttgacagctgtaagaatacgctcgtccaaaccttccggaaatacgattttaactccttttcctgctacttttccctgcactgttgtaaatagatctgccactatataccctccttgaaagtgtcacaaatacttcatttctctattaagcatactcttttgtgatataaattcaatccttctgtattttattataacgtttacactttttaaacgctttttttaattaatttaatttcagaaaggctttaaacacttctattagtatataacagcctttcccagttatacgacagatggtcaccttttgttcaaaacttctaaacggataaaacgcggcaaactatgatatgatgaagacaagtacatacaaattgggagtgattgcaaaatgagcgaacagcaaaaaacgaatgaagccgcacaaacgcttgacggctggtatgcccttcacgatttccggacaatggactggtccgcatggaaaatgctttcaagcgatgagcgccagatcattatcagcgaatttaccggccttcttgaaaaatggggagctgcccaaaaagaaggaaacggaagccatacgctttacagcatcgtcggccagaaagcggacttcatgctgatgattttgcgccctacgatggaggaattaaatcaaatcgaactcgagttcaataaatccaaactcgctgaatacacgatacctgcttattcatacgtatccgttgtcgagctgagcaactatatgggaagcggagacggagacccttacgaaaatccgcaagtgcgggcgcgcctgtaccctgagctcccggatgccaaatatgtctgcttctatccgatggataaaagaagatcgggcgatgacaactggtacatgctgtctatggaagagagaagaaacttgatgcgcagccacggaatgatcggacgcggctatgcgggaaaagtaaaacagattattaccggctcaatcggatttgacgattatgagtggggtgtcacgctcttttcagatgatgtgcttcagttcaaaaagctcgtctatgaaatgcgctttgatgaagtaagcgcccgctacggtgaattcggttcgttctttgtcggcaaccgccttgcaaaagaacagctgcctgcatttttgcatgtgtaatgataaaaaagctccaaaggccgaggtctttggagcttttttgcctatttacttgcagttgcacggctgtgtaggcggagtcgcccgtttttgcacttcgattgaagattcggcatagaaagtcgatccgagccccagtactctgttctccgcccggaatgtatactttcctgcggcaggcagcgttttgttggccagcaccagcttaaactccgcaatgcccagcagatcaattgtaagcggcagccttaccgtttttccgttgttcaaaatttgccctgttgtcagcgctcttccattcaccgtatctttcgttgtggcggaaaatcccgacggcaaagtaaattcaaccgttcccagcgccaagattgagttaggacgatatgttaactcaatatccgagaacgaccactcctgtttgctggcgcctgttatcaccgaatacaaggaagcgctcgcagccgggcggtagacagattcagtttttgttgtttgggcgctggcctggaacgaaggcaggaaaatcgaagccatcatcacgagactaaccgccaagattgacaatttagaacgatacattcttttcaacacagcaattcccccaagtcatcatttttttcatattcgtcatgacgaaagcgtgcaagaaagatgtaaaatcaagcaacgccttctttccaaagcgccggcactttggtgatttctattaaaaactaccattttttctgcttgtagtaaatgttttccatgtcatatttttaaaataaatgcaaaataatagaatttaaccaggcgttgttcctcttgattttctccgctgtgctttagtaaaggacaaaaggcctgcccgcttcccttctcttcattctcctgattttttgttgacaaacgatggatctggctgtacattattgacattattgaagcatcacgaaccgagtttatgattgacataaccttgctttttctccattcatgttttgaatggatgaagaaaggaacgaaaaatgcctaaattggtttcttcaaatcttgtaaaaggtaagatcatcaatattagtccgccgcagacgctggctcttagtttcttgattatcattgcgatcggggcttgtttattgaagctgcctggcgcctccactacttatatctcatgggtggatgctttatttacggccacctcggcaactacggtaactggccttgttgttgtagatacaggggcagattttacagttttcggacaaaccgttattatgtgcctgattcaaatcggcgggctcggcttaatgacgtttgccgtcctcgtcgtcatgatgatcggcaaaaaaatcggcttgcagcagcggattcttgttcaagaagcatttaaccagacttctttaggcgggcttgtccgcttggtcaagcacctgtttattttcacgattgtcatagaatttgtggcgtttctgatcctttcgatcagatgggttcctgaatatggtttgcaaaaaggcttgtttcatagtttgtttaacacgatttcagcctttaacaatgcgggattttccctgtggcctgacaacttgtctcaatatgtcggcgatccgattgtcaaccttgtcatcacaggccttttcattacagggggaatcggctttaccgttctgctggatttatggacaaagcgaaacttccggaaattatcgctgcattccaagctcatgatcgttggaacattgatcatcaatacgacagccgcgttgctgattttcattttagaatactcgaatccgggtacgctcggcggactgcctttggccgacaaaatgtggggcgcttacttccaaggcgtgacaccgagaactgccggattcaatacgcttgatatcgcccagatgacaacgccgtccctcctgttaatcatcgttttgatgtttatcggagccggaagtgcgtcaacgggaagcggaattaaactgacaacgtttatcgtgatgatcttggcgacgatcacctttttaagggggaaaagcgagacggttgtgttcaaaagggcgattaagatgaaaaccattttaagagctttagccatcattgtgatcagttttttattcgtgcttttcgcattatttatattgacgatcacagagaatgccccatttttgaaaatcgtctttgaagtattttccgctttcggaacagtcggcctgtcgatgggactgacacctgatttaacggccgcaggcaaagcggttatcatgatgatgatgtttatcggccgcgtcgggcctctgactatggcgtttacgctggccaagccgaagaaggcgccgatccgccatcctgaagatgaagtgattacaggctaatatgcagaaagaccgctctattcacgagcggtctttttgtttttctctttccaacatgatgtgtcgtcatattccctcccgcccgttcatactgtaaaagggatgggaaatattgatctatcatcttgagtcagcccacagcttttcagccggatcgtcttcatagcagcactttatcattcctcatgtatagatggtaggcatgactttgacacaatgaaatgaggaggaacgagatgaaatttaaaaaaaatcagtttcagccgcttcaggagcttgagatgccggatttccggcagcaaatgggccccaatccttatccgcagatggggcagatggggcaaatgtaccagcagcagggacagcagcctttcacccaaatgggagggcagcaatcgtatcagcagcccggtccccagctgacccagccgcagccggcaggcgtccaggtccctccaatgccttcaggacagcagccttcaccgagcatcccaggcatgctgccgcttgagcaatcctacattgaaaacattttgcggctcaatcgcggaaaagtggcaaccgtatatatgacattcgaaaacaatccggaatggaatgcgaaagtctttcggggagaaattgaagcagccggccgcgaccacatcattttaagcgacagaaaaacgggcacacgctatttgctgctcatggtgtatcttgactatattacgtttgatgagccgatcacttatgattatccgtattcaatggcctcatatacaccaagataaaggttcggtttaactaagccgaaccctttttttatagatgttaagcgaagtttctcacatcattattgcgtttgaatttgtaaatgacgatgaggaaaaagacagcagcgaaagcaaacagaatcatgatattcaaatacagaccttgaagctgctgtccctcctgcaattttgccagcgtatccaacacccaccgctgcggaagaaagtccgcgattcgctgtgcgaaagacggcatgatttcaaccggccaaaaacatcccgacagcatgatcgtcggcataaaaatcaaatttcgcaataccccggatgacctggagctgtttgcaaagacgactgtgatcaatgccaggccgaccgcgctcagcgcaaagatcagcagcaccgctgccatctcccaaaatgagatgccggtttccatccggaaaacatatttcaccataatcaatgttaaaaaggtttggcatgtgatgacagacatactgacggccacattggacatgacgtactgccttgccgttatcggtgtggtcaaaagcctgaaatacgttctgttctctttttcctttactaacagttcggtcaagcttcccgctgaaaaaagcatcgccatcagaagaaaaccgaccgtccgctccgtcatgtttctatttttcgccgtgtcttcaatcgtagatgttttgacactcgtttcagaattccggtaatttttatacatttcctcaaagcgcttttcattcccctgcgccgatttgccgattgcggcgatattatcaatataatgatagacatacgatttcacgaatccggtgatttcagcgcctttgacagatgcgattgcgatgtgagccggttcgccgctctgcacgctttgagaaaagccttgttcaaacgtaatgacgcaatcaagctcccctgccgcaacttgacttttcccttctgcttcactgaccgcactgatgttgacattctcgatccccttcaaaaaatccttagtatcttcggcgattcgtccgccgtcatgattgatgattccgacgcgcaaatccgtcttttccatgcttccctctgtcaaaagcgatacgaatatgcctagcaagggcagacatacaaacagaaagatattgatcttctttttaaaagtgacattcagtgtgtttttgacaagccatagcatttctttcatcctacagcccctcccttctctgcaatgagacaacggcaatcagcagaaataacagggataagccgatgttcagcaagatggcaggcagccctgccgctaaatcgtccgcaaatatgatgttcataatagcttcgttcgtccaggcgagcggagacaggtctgtgatcaaagctaaaacaccttccgcatcgtcgacaggaaaataagcgcccccgaaaaatgcaactagcggaatcaacacgttaatgatcgccactgccgcttcccccgttctcgtcaaataactgacgccgaggccgaggcatacggcaaacaatacgatgctgaacagcacggccgctacaagcccaagatgctctccccagtacgctttaaatacgtatttgctgactgcgacgacggcaaaaatacacaatccgtttgtcacaagattgccgatcagcttacccgcaaagatctcgcctttatgaaccggtgccgcgatcagccggtcggctgtttttctaagccgctccccccttattaaatagctggcgcttaatgcactgtaaagcgcgatcagagtggtcatggcaaccgcataataatccatggagctgggctttctgtctgagctgagcgacgtctccttgatataattgtcgcccggtgcgtccccgagcacggcgcccgcttgctcaggagcagctttgatgatctccgctgcggcattgtaccggtttgcaaacgcggtcagcattccttgaataatgctgtttttcatactgtttttatccatttggtaaagcttgatgccgctgttttcgatctcaagataagcatcgtagttcccctgtttgatttcttgtttttcatccatatcggacaacacttttttaaaatgaacgccggatgttttcgcttcctttacgaatgttttaaagccttgcgaaaacgctccgtcagaattgtctttatacaaaacacgaacctcgccgaccgctgcttgttgatcgaaagcattcgtcagcgcagtgcctaaaatcataatcagtacaatcggaaatgccagcataaaaaggaacgtccgtttgtcccgaaaagcagatacaatttcttttttcgcaatgatgagtgtattcaaaccttggacctcctttctaatcgcgcaactgtcttccggtcaaggtcaggaacacggtttccaaattaggcgctttttcttccaatgaacgaatctcggccccgtttttcatcagcttttcaataatctggtttaaattattgacgcctgcatccgagttgattttgatcgtattgtcttcaagaacggccgcttccacgccgctgatcgttttcagttcgccgatatcgatattttccgcagatttaagaacgacttgaatatcttttgtgttggtaatgatcgatttcagctgctccttcgttccctcggcgataatttttccgtgatcaacgatggcgatccgagtacagatctcttcaacttcctccatataatggctcgtgtaaataatcgtgcatcccatcgcatttaactttttgacggattccaaaatataatttctcgaatgcggatcaattccaaccgtcggttcgtccatgatgatcagctttggcctgtgggcgatcgcgcaggcgatattgagccttcttttcatcccgcctgaaaaatttttcgggaagcttttatgcttatcacttaaaccgacgaactgcaatgcttcttcaacccgattgtgtaaatgggccccgcgcagaccataaagcccggcaaaaaatttcacatttgcatatgccgttaaatcttcgtaaatggccagatcctgcgggacaatgccgatgttcatcttggcgaacttgcggtgtttcgcaatgttttttccgagaatcgtgatctcgccttcattgcttctcaacaaactcgaaatcatgtgaatggtcgtactctttcccgccccgtttgcgccgagcaatccaaatatttcgccctcttcgatcgagagtgatatattgtcgacggcaacgaagtcgccgaattttttcgtcagatgatggatttccaatacattcatgttctcacctcattttgatttcattataaaaaaaagatgaatggtgcggcagtgcagcatttcatctttttcacatgagaaaattcatattcaattcatgaaatcattcatgcttgggcagcagggtggtgacagagaagccgtttgaaccgtcaacgatcacctttccgttaacagaagcggcccgttcctccatcccgatgatccccatccctttcttgattttctgccgcccttttccgttgtctttcacttcggctttaatgagcgtattcagcacatgaatacagatggatacatgtgtcgcttcagcatatttcaccgagtttgtcagcgcttcggtgatgttttcaaaaataatcttccattgaatctgagaaataacatccaaatcgcctttatgcaaaaatgaaatattcatatggtactgcgccgaacattcatcgataaacagcctcaatctgtggatgcccatctgttctgagggcggcttgacgctttttaacgtcaatctaatattttcgatcccgtccttggagatgttaatcgcattttgcaggagctctgaagctttttccttgtctatgtcaaggacgcgcttcgccgcttcgagctgaatcagcgctcctgtcatggaatgaccgattttatcgtgtatttcctgggaaagccggttgcgctcctcaagcttataagtatattcggattgtctgataaactctttgttttcacgcagcatgtttgtcagcttctgcaggtctcttctcgtttgatcaatatgatgttcaagcttttcaatccgcgctgcatcatggcttgccgcccagtacagcaaaaattgaaaagcggccgtcaacgcgtagaccgctgagatgctttcattgataaacaagaccggaacgattgaagcggcaagtaccgcccacttcggcagcccaaaatcggctgctccttcacacagggtaaaaggaaggaataaaataaatagggggtgcacttctgcataagaaacgattgaaatgatgacagaaatgataataaaaagcttttttgtttttcctttaggtaaaatcgcaatcccgaggttgatacagacgtaaacaagaaggctgaacacaagccacggcagattgtcactttccgaaaaaacgcattgatagatgataaatcccaacaaaatcagtttgccggtcataatccgcaattccatggtgatcccccaggttaaaagttaactttaccggttaaataataaatcgcaatttgcgtccgatgttcaagccctgttttccccaaaatcgaggaaatataattggcaatcgtaccttcagagataaacagctccttcgaaatttctttattggacagccctctggcgatcagcgccataatcccgagctcgcgttcggtaaacaggctttcgtctatcttaggttccgcttctttatgctccgccaaattggacttaatcttgtcgaggatgatatcctgcatcacaatatggccgttgaacacacttttaatcgcgtctctgattcgctcgggttcggcatttttcagcaaatagccttttgcgccgttccgtatcgcagcgacgatgtattcgtcgtcatcaaacgttgttaagataaaaggcttggcgcccgtttctgaaatgagccgcgcagcttccactccatccatgttgggcatgcggacatcaaggagtgcaatatccacagcttgggcgcggcaaaattcgaccgcctgcaagccatcctccaccgtcgccagcacttcaaattcatcataagtgctcaatatgattttcatgccctctcttatgaatgaattgtcatccgcaatgatcactttaattttcatcgtttgaacggagaccggtcctccgccgtgcacatcccttctgtcaaaatgcaaaagccgggtctttcgccctgttcataacattaaattaccatgaatcagcccctgttaaaataaaaaaagccaatccttttcagagattggcttttttagtaaaactacaaatatttgaccgctgagacaacgaccatgatccatgcggcaataaacgccacgccgcccagcggagtaatcgcaccgaggacgctgatttgcgtaaggctgaggacatataaacttccagaaaataaaacgattccggcaaacatcagccaccctgccgcagaaacgcttcccgcacctgccagttttgacgcgatgagcgcgacggcaattaaaccgagcgcatgatacatatgatactggacgccggtctgccagatttgcaaatatttctcgggaattttcccttcaagaccatgggctccgaacgctcctaaagcaaccgcaagcatagcattgacagcacctaaaatcaaaaataatttcacgatcaaatcgcccgcctttcctttatcatcatagcgtacatgtcatgaatttcaacttatgcaaatctcatgacacgatattgtcatatttctttttcctaagctgtatttgttccgcagcaatcgctacgattgttccaaggacaagcccattgcttaaaatggaaacaaaaacaggatgcatcccttccaaagcactctcaggtacaaacataacccccacaccggcaaggagcgcaatcccggtaacaaagcggatgcggccggcctcgtccttttcataagaatcgaattcggcaaatgccaggccgaccatcgttgaaaacacgacgaagttcaccgcaaaaccgaccggagacggcaggctggcaaaagtattcatgaccagcgggaagaagctgatgacgattacgatcagactcccgagcaaaaacggttttttggaagacatcctcgtcgtttgaataaaccctgcagctccggatatcggcacggtccctacagctccgagcagtccgctcagcaaatggctgacagaggcgataaacccggccggacgggcccgcttcctctcttccagcttctcaaactgtttgactgctccttcaaccacccgtatgcttgcgagcatattgacgattaacaaaactgtaatgaacaacgaagtaacaaccagcccgctgtcaaacatcggcatgccgaaaggaaaaatatccggaaggtggaacagctggttcgcacgctcgggcgccttcgccacgccgaatacggcaaataagatccagccgccgaaaagcgcaattaaaattgaatattgcttgagaatcggaacgtttgaccggctcatcagaaacgtagccagcataatcacaaccgccagcaaaaacacgggtatatcgacctcgtttttccggtagccgatccccatgacacctttaacgatcggatcgctaagctggatgaccagcagcagtaaataaatgcctgtcacaacaggagtaaacatcacagccagcttatcaatgactttaaataaactaaaaataaagaagaaaaccgcgcttagcagcatcgctccctgcagcccctggagcgtttcgatgtgagtcgcgaatacggtccctgtaagaccggcataaatcgtgtagacgccccaccagaggccagccggactctcattaatcggcaggcggtgtcccaataaacattggataaaagccgttgtgccgagcacgaaaaaagtgctttgaaccaaccccgcggtctctccctggttcagcccgaatgactgcccgattgcaatgggcaccacgattgcggacgcaataataaatgccgtccattgtaaagccccaaaaagcagtttcaagttgatcaacctctcttttttaaaacagacggacggcgcctagaaatcaaaaatagaatctccgttgccgtcatcttcatgcttttgtttctcttgttttttgtattgttcagcaccggcgctccccatcattttttcgagcatcagctgatcgctcgatggtttattggccgtttgaacataaggcgaagactggacggacggcccctgctgcggttccacaatgacgtcgcaaagggagcggatcaccgcgatgtgcattttcaattcgttttcctggtggcattcctttgcttttttcaattcgtcctccatcttttgcagcaaacttgatatatgtatgttcatcaaatcgatcctccaaaccgttttcagtttccatttcattttaccaaattaacttctctcatgccgaatgcacttttcaaatattccttgcgaaaaattgcctctgctgctatgaagcattgtcttttacatttcaaaaaagaatattccccggcaaaacgcgggtgaaaaaagccaattttcttccggacagaagttgacagctgaaaaggctgtcacccataatgaaaaaaacttcactcgaatttctaaaagcgaaaggaaacagggaatggcagaacgaacaacctccatcgaaacgaccgttaccgagcaaaagcaatattttttaagcggggcaacactagctgttgaaaatcgtctggaacagctcaacattctaaaagatgctgtaaaaaagaatgaacggaacatacttgaggcccttcagaaagatcttaataaatcagagcacgaagcctatatgacggaaataggcattgtactggaagaaatccgcttcatcagcagacgattaaaaaaatgggccaaaccgaaaaaggccaaaacggccgtttcgcacatcggttcaaaaagcatcgtcattcctgagccttacggcacggttctgatcatcgcgccatggaactatccgtttcagcttgccgtctcgcccctgatcggcgcacttgctgcggggaataccgccgtcatcaaaccgtctgagcttgctcccgccgtatcaaccgttatatccgagatgatcaaagatatctttccgcccgaatatgtgtccgttattgaagggggagtgaagacaaaccaagagctcttgcggcaaaaatttgactatatcttttttacgggcagtgttcccgtaggcaaagttgtcatggaagccgcggcaaaacagcttattccagtcaccctcgagcttggcggaaaaagcccctgcatcgtgcacaaggatgctgatctcaagcttgcggctcaaaggattgttttcggaaagctgacaaacgcaggacagacttgcattgcgcctgactatctgctcgtacacaaagatgtaaaaaatgagctgatgcgcgctctgaaacaatcgatccaaacattttacggagaaaagccggaaagccatctggcttacggaaaaatcataagtaaacgtcatttcgaacggttaatccgctttttacaaaacgagaatatcgtcacaggcggaacatatcaaaaagacgcactcaaaattgctccgtccattatcgatgaacctgactgggaatcgccggtcatgcaggaagagattttcggaccgatccttcccgtcatcggctatgaaacgatcgaagacgttatccaaatggttcaaagccgccctaaaccgctcgcgctctatttgtttacgaatgaaaaaacggtacagaggcacatcctcagccggatttcatttggcggaggatgtatcaatgacacgctgatgcacacagccacaccttacctccccttcggcggcgtaggcgaaagcggaatcggaagttaccatgggtatcacagctttaagacgttttcccatgaaaaaagcgttttaaaacagacaaacctgtttgacatttcattccgttatccttcatcgaaaaacgggctgcggatcatcaaaaaacttctcaggtagacaggagccagacaaacgaagaaccgcttttttagcggttctagcgattaaagattcggaagggaccagtcaatcggctcatccccgatttgttccaaatactgattggctcttgaaaacggtctgctcccgaaaaacccgtttctagccgagaacgggctcggatgcggcgattggataataaaatgcttggatgtatcgattcgttcttttttcatttgggcatgccggccccagagaataaaaacgaccggtttgtctcttttgtttaaaacatctattatactatctgtgagctgttcccagcctttccctttatgcgaatttgcctggccccgtctcacggtcaaaacggtgttcagcagcagaacgccttgcttagcccagctgacgagagaaccgtgattcgggatgtcggcgccgatgtcattctgcaattctataaaaatatttttcaaagaaggcggtggattgacgccgggttgtacggaaaaacttaagccatgggcctgacccggaccgtgatacgggtcttggccgagaattacgactttcacattttcataggaagtataatgcaaagcattgtatatatcgttcggttcaggatatacggtgtgttcagcatactcccttttcagcatttccctcagttcttgataataaggcttatcaaactcgtccttcagctgttgccaccagctgtcattcaaaatctgtttcaatgttcaggcctccttagttcaattgtcttgcagcagtgagcctggatgcaaccggttttccatcccagacgatttcgctttccgcttccctttttttcatggcaggttcttcgagtagcacgaaaaagttctttgtcggcagcttgccaagctgatgcttttcactcaagacatccaagtaatactgcctcattccgccaagatctccggactggttgtcaccctggtctgaaaacgcatagattacgcttgcgaaaggaactcttttcacgcgaaaccgctcagccgctctcaggaaaaagtcccaatcccaataattgtggacggcaggatcgaagtagccgatttcgtcatgaagagatcgtttgtacatacttcctgaaggaacatatgtagaaaacttcctcatttcatccaagttaaaggaatacgcaaaaaggtaacggcttgtcggaattctcatatcctctttttcttcaaaagacacaatctcagcatccgaataaacaaaatcggcggtctccagcgcattcaacattctctccatatggcacggcgtgaaaaaatcatcatcatcacacagcataataacgtctccggaagcttctttcacccctatatttctcgcttttacatgcttcacgttttctttcagatgtataactctgatcggaagctctgaataaaggcgctcaacaaagtcgacgctctccccggcatcattaacaataataacttcaaacggttcaacagactgttttgcaatagattcaagcaattcgcacaaagcggtgacccgattatgcgtgacaactacgatagatatgttcatgtttgtgatatacgctccttcttatttcattctaaacatattaaagcataatgcgaataatttcacatggatcaaaagatggtctggttttttatgccaatccattcacgaaattttgcagaggaccgctgcactataaagcggcagccatttcattgtgatcttgcgaaaagctgtctataataagtaataaaccaactttggatggaatctcttatcgtggaggattgactgaacatgacaatgcacaaagcactgacaatcgccggctctgactcaagcggaggcgccggcattcaggcggacttaaaaacgttccaggaaaagaacgtctatggaatgacggcccttacggttgttgtcgccatggaccctgagaacaattggaatcatcaggtgttcccagttgatacggaagtcatccgcgctcagctgtcgacgattgtggacggcatcggtgtagatgcgatgaaaacgggcatgcttccgacagttgacataattgaattggcggcagacacaattaagaagcacagcatgaaaaatgtcgtcattgatccggttatggtatgcaaaggggcaaatgaagtgctgtatcccgagcacgcaaaggctttaagagagcttttggctccgcttgccacggtcattacgccaaatctttttgaagccggccagctcagcggccttggagaaattaaaacggttgagcaaatgaaggaagcggcaaaggccatccacggcctcggcgcccaacacgtcctcattacagggggaggcaaactaaatcacgaaaaagcggtagatgtattatttgacggccgggatgcagaggtgatcgaaggagaaagaatcgacaccccatacacgcacggggcgggctgcacctactccgcggcaattacggctgagcttgccaaaggttcaaatgtaaaagaagccatttattctgcaaaagcgtttattacggaagcgattcgcgaatcgttccgtttgaatcaatacgtcgggccgacaaagcactccgctttacgactcagcggcaaataaaaaaagccccttttatgtaaaaggggctttcatttagctttcccgtttgatcgttcttgcagatgatcttaagaaagattcgatcgattccacaaaaagagcatattctttcatttgttcataagtgtcctgaagtttcttttgtacttcctcatcatttggaattgttttatcttcaataccgccgatcagcttcttcatctggaggagcaaaccattgtattcctctctcgtatcctcaatatggtccgctatttttttcaaacgcatagcggtcaatttctgctggttttgatccacaaaaacaacccctttatactgcactctctctaaaaaaagcatatcataaagggattgtacagaaaatagcaaacagcagccgctccctttatgccattgtccaggatgtcacattcattatgatttcttttctggcactgatccaaacatcattatttcccgggtaaggaaaatatcttgccgtaaagacttcctctccctcattgacgaagatttcaatagaagaggcgtctaaaaagatgtttaaattgcgaagctcctgcaaacggcactgtctggcttccgttttttcatcaacataactgtttctctccaaggttatgatgccttctgctttattgtatatgagtcgggctgcacccctgaaggaaatctcaaaaccctcttcaataactttcggactgatgaaaagctcagctttgtccggttgaacaatgtccaatttttcggtgccttgattaagcgatattgccgcgtttttttcgttttggcggagcgttctaagctcctcgaccggtttttgaacgattttatcgttttgtaaatgcaattccctcggcaatgtcatacagtgcacccattgatgcggaatcgtcggctggctctgttcatcttggtctggaacacccatccaggcaaccaatatcctccggcctgattcgtcttttgtcgtctgcggcgcataaaagtcaaagccgcggtcaagctcttcgaaatctccgtgtgtaaaccagggtttcagctcgttcaattcaccgacaaaatagcctgactgatagacgttttggtagagcatctcttctgcttcaaggccttgcggacagacaattaagacgtctttgccgtccagttcgaacatgtcagggcattcccacatatagccgaattccccgagctgatctgtatttgaacctgtgatatcgccgaggaactgccagtccttcagattatccgattgaaacagcaccgcccttccctcaagattttcagtctgggcgccgagcaccatgtaccagctgccgttctttttccatactttcgggtcgcggaaatgagccgtataccctttcggaagccttgcaacaaccccctgcttttcaaacgagatgccgtcttttgagacggcgagacattgataggtctccctatttccctcgccgtctctgacattccccgtgtaaaacagatgcagcacatcattttcagcgatcgcgcttcctgaataacaaccgtttttatcaaaccagtcgctcggcgtgagggcgatctcttcatgccgccagttaaccagatctgctgaggagtagtgtccccataactttgcaccgtgccccgttttaaaaggcatccactgataaaaaagatggtacacccctttccactgaatgaacccgttcggatcattcagcagtccgacaggaggcatgatatgataatgcagccgatagggatcaaggtttacaatatcccggtattcttcaacccggttcattgccttttgacgaagctcctgatcttgattcatcgttttccctccctccgtcactttttctcgtcttcattaatgcctaagataaaggctgtgataaatgcgacagtcacagaaatcgccattccgattaaatagtggatcaggttgcccattccaagcggggcgacaatcgcaatcatcggaattcccgtcaaaccgtatgcgtttgctgcaacattcataaagacaacgtatgcagctcccagcgctcccccggccattgccgcgataaacggccggcggtaacggaggttgacaccgaaaataacaggttcggtaatgccgagaaaagaagagaaagcggcaggtaaagcaatttcttttgtttttgcacgctttgccaaaaagaatacggcaagtccggccccgccttgggcgacattggacatagaccagatcgggagcaggtagttcctgccgatatcagcgataaggccggcctcaatcgcatggaaactgtggtggacaccagttagaacgatcagcgagtatgttcccccgaaaatcagtccggcaacaggcccggcaacgtcatacacatatgttaaaatgttcgtgatccctgtaccaagcattcttcctaaaggaccgatcgcgataaaagcaatgaatcccgttgaaataatcgtgacaaacggtgttactaatagatcgatcgcatttggaacgattcttcttacgcctttttcgattttactcatcacatatacggcaagcaaaattggaacaacggttccttgatagccaagcatctcgattttgagtccgtaaaagtccatcacatccggtgatgcagttgcaagtccccaaggattgaacaagctcgggtgaattaaaattcctccaagtacagcccccaggtaaggattgctgccaaactctttcgcagcactgacaccgatcaagatcggaaggataataaatgccgcgctcgagaacatatcaagcattttatacagcgccgcatcaggatcgacccactgaaatgccttcatcattcccaacagccccattaataaaccgcttgcaacaatggccgggatgattggcacgaaaatatttgacagcgttttcgcaaatcgcgctaaaggattcatttttccctttgcggcatcgctgtgctgaaccgtttccttttggtcaagattcagctctttggcaaactgttcatacactttattaacaagccctgttccgaaaataatctggtattgaccagagcttgaaaaggctccttttacaccttccagctcttcgaccttttccttgtcgatttttgcttcgtccttaatcaccaaacgaagccttgtcgcacaatgagctgcactgatgacattatcttctccgccaagaagctgtataagacgtacagcgatttctttatgaatcatgatgactcctcctttttttttaaaaaaaagcagaaaagacctaaaattcaccaacgaatggaggatagattttccccattcatctagcaaattttaggtcttgcctgctttaccagtcacaatccccggtatttattttttaatacgctttcattttattatgtgataacgctttcgtcaactacttttttattctctgtgaaaatcgacctaaaaaaagcctgatcgcgcgatatcaggcggtattacctataggaatcatttaaacgctggacatgcagcgtaatatatccgacttctgattccggaagatgaagatcatattcagtttttacgtaatccgccagccctgccgcacatcggtagctttcaggatacttttgccggatgaaataaagcatgtcatcgtccatgacatgaaacgcttcatttgattccagccggttgatggcatacctgagatgcgtgacaagacgctgatatgagatgctgttttcgtcaatcttctgattgaaacagcattcgattttttctatcaattctttgatgatgttcgtgtattttagagtcttctgcatgttttccgcatccatttttgcggtatgaatatgcagcgcaatataacccgcttcatcatcaggcaattcgactttcagtttttctttgaccaaatcgattgcccagagtccgatctcatattcttttttataaagcgctttgatttcatttaacaatttattttgaatgacgaatcctttgcggactcgctcgatcgcaaatgacaaatgatccacaagggcgatgtggatatgatcgctcaacggtgcggacagctccccttccgcatagctgatgatctcttcggcagcttcaatatgttcttccggaagtgtttcgaggatttgtttaaacttttcattttcttcatgaatggtaaaaattttttctaccttgtttcttggaatggtatcgtttttgcctttttgaaaagcgataccaggtcccatgacaattttttcttgaccatcctcctttatgattgctgcattgttgttcaatactttatagattttcaaagctgtcacccacttcccattatgagtgggattttaccttgtttaagttcccgtgtaaagagttggtccggctcttacccttttcaccgcttttttgcaaacagcccggctgggttctgtcgtataactgccgggcttcattctcttacagcccgacatccgctctgtcttctcttctcttttttccgaaaagccgcctgcctgataagcatcggcagcctgatatgtaccgccggcgaacgccgtcaccttcatctgattttctctgacaggcatcaccgcattcagcagcacggctgtccataattttaaaaatgatatcaaacctttcataccgatccctccagtttcgttttgataaaactagcaactctattaaactttcttgctctatcttatcccagcaaaatgaaaatgtttgtcacaatgtgtgtgcaaaatgattctagtttttagaagttttgttgaaaactgaaggaatcgcatgattcagcggatacaaaccatgaatgtaacttactcacagcttatcctaaggataaacacatattacccacaggatatatccacatatccacatacttattcaatatttagtataagaacgtatattccctacaatatctatacacaagtttattcacttatacacagtaaattgtgcataaatctagagaaatccactccaatacattgaatctttgaaaattatttctatatatagaaggatttttttgaaactgagagaatattttaaaagttcgaaactctaataattacaaagaaacatttatccagaagggggaaaacagattgagaaaaagtatcgtgcgctattttgttatggcttttattctattatttgcgttatccacattcctcaccggagtgcaggcaacttccgttcccgataaaaagtcgcctgagcttgagaaagctgaaatctacggtgatattgatgtgacgtctgataaacagacgacggttatcgtggaactgaaagaaaagtcgcttgccgaagcaaaagcggacggagaaaaacaaacgaaggcttctctaaaaacagctcgaagcaaagcgaaaagcaaagcgctgaaaacacttaaaaaagcgaaagtaaaccgcgaatacgaccgtgtattttcgggcttttctatgaaactgccggccagtgaaattccaaagctgctcgccgtcaaggaagttaaagcggtttatccaaacgcaacttacaaacctgacagcgtaaaaggaaaagacgtgacacttgcagcagacgccatttatccacagatggataaaagtgccccgttcatcggagcggatcaggcatggaaatcgggctataccggtaaaggcattaaggtagccgttattgatacgggcgtggattacacccatcccgacttaaagaataatttcggcccatataagggctatgactttgtggataatgattatgatccacaggaaacaccgacaggcgacccgcgcggcggagcgactgatcacggcactcatgttgcaggaacaatcgccgcgaacggacagattaaaggcgtggcgcctgaagcaacgcttcttgcttaccgcgtgctcggccccggcggctcaggcacaaccgagaatgtgattgcgggcattgaaaaagccgttgcagacggagcaaaagtgatgaacctctcattgggaaattcgctgaacagccctgattatgcaacaagcatcgcactggactgggcgatggctgaaggggttgtcgccgttacgtcaaacggtaacagcggaccggaaaactggacggtcggctcgccgggaacatcaagggatgcgatttccgtcggcgcatcacagcttccgtataatgagtattcggtgacgcttccttcgtattcatcagcaaaggtgatgggataccaagaggaaaaggatcttgaagcattgaacggtcaagaggtggaactcgttgaagccggcctcggacaagctgacgatttctcaggcaaagatgtgaaaggaaaagttgcggttatccagagaggcgtcataccatttgttgataaggctgaaaatgccaaaaacgccggcgctatcggagccgtgatttacaataatgcaacaggggaaatcgaggccaacgtcatggggatggccgtaccgaccgtcaaattgtcaaaagaagagggcgaaaagcttgttcaacagatcaaagaagggaaacactccgttgtcttttctttcaaattggacaaaaagctgggggaaacaattgcctcattctcgtcccgcgggcctgtcatggatacatggatgattaaacctgacgtttcagcgccaggcgtcaacatcgtcagcaccattccgacccacgatccgaaaaacccgtacggttacggttcaaaacagggaacaagcatggcttccccgcatgtcgcgggaacggcagccatattaaagcaggccaaaccggattggacgcctgagcaaatcaaaggcgtactgatgaatacggcggaaaaactgacggatgaaaatggaaagcctctccctcacaatacgcaaggagcgggcagcatccgcatcatggaggcccttaaagcttcatccattgtaacgccgggcagccattcatacggaacattcctgaaagacaaagggaaacagacgaaaaaacaagcgttcacgattgaaaacctttcttcacacagaaaagcctatcagctcgaatactcctttaaaggaacgggcatcacggtatcaggaacggaacgagtcgtggtaccggccaatcaaacaggtaaagcagcggcaaaagtaaccgtcaattccgcgaaaacgaaagcaggcacatatgaaggcacggtttacatccgtgaagacggaagaaaagtcgccgaaatcccgctcctattgatcgtcaaagagccagactacccgcgcgtcacatccgtaacagttgaaccgggagcaaagcagggcgcttacacgatcgaagcctacctgccgggcggggctgaagagctcgcatttctcgtctatgatgaaaacctgaaccttctcggccaggccggcgtttacaaaaaccagggcaaaggctatcaatcttatcaatggaacggcaaaatcaatgacgccgcatcccttaagtccggaaaatactatatgcttgcctatgcatccgccaaagggaaatcaagctacgtattgacggaagacccttttatcgtcgaataatgacaagccttgttgagaaccactcaacaaggcttttttatgttaaaatacggataatgcgttcaggagaagctcccccttctcttcaaaacgtgaaaaaagcaatcggaggacatcgtgtatatgctttcttttatcgtattattcggcttatccttcattattgtctgctttatatttttcacgattttgtacttcgccgtcaacctgcagaagcgcgagcccaagccttttcaaaaagctgcggagcaaaccgtcgataccatcatcctcattccgctcagctggctgtttaccgctttatacatatgcattctgtttattcttttcccaatccgccattttctcgatttttttcagcaaaaacgctaaattgactgatgaaacgcttcggccagcagccggtatgaatccaatctgtcttgaaaatcgtgggtgatcgtcaccgccatgatttcgtccgttccgtaagcgccggccagttcaagcagctgttcctttacctgctgcggcgttccgatgaccatccgttttcgattgtcttccactctctttctttcataaggagaatattgataggacagggccgtttccaatgatggaaagccttcggtcaccatcccctgttcattggccaataaagaaaaatccaagcttttggcaaggttctccgctttctcttctgtctcagcgcaaatcacaaatacggcaacgatcacatttggctgttcccccaatacagaaggttcgaacctctctttgtacagtctggccgcctcttctccgccttcaccgttaataaattgagcaaatgtatatgatgcccctgtttgggcggcaagccttgcgctttcccctgaggagccgagcagccaaacagcgggcgctgtggcgatgttcggcgttgcggtcaagttgggaaagcggtgatgttcatcggcttgatcgtataaatatgtgacgaggtcctgaatttgttctggatattggtcagccatccgtcttcctccattttgaagggccattgaagcgatcggcatccctcccggagcacgtccgacacctagatcaatcctgccgggcgcaagtccttccaagacgcggaagttttccgccaccttgtaggcgctgtaatgcggaagcatgacgccgccggatcctatacggatcttctctgttttagccgcaagataaccgatcagaacctccggacttgaccctgccaagttcctggaaaaatggtgctcagaaacccaaaacctcttgtatccgagccgctccgccgcttgcgcaagctccaccgtatgctgcaaagccagttcaggtttgcttccttcagaaacaggagtctgatccagtatgcttaatgacaacatctttttcaccccaaatcttcgtttactttttctgcgcaaaaagaaataatagtatcatggataaactaaaggagctcccagtactgatgaatgagacgaagcaaaaaacgcacccgccagccgtagaagaacgctttgcaaaaggctgtttattcggaatccttttcagtctgcccttttggctgatgttttatcttttccttcaatacatgctgataagataagtcccctccgagtcggaggggaggttccttaccttttgttcaaaccttttcctttaacgaattcattcatatacgcacgcggcggctttttgaggctgccggtgatctggtctgtccatttgtcagaccgtttgccgtccgtccgcttttgataatagtttgaaatcgtttcgtcatatgcggacaaatgcttttcaaactcggcatcatccgcttgatagacattttcatgataaatgtgatcaagcggcagacgcggttttttggccgaagggttggccggctggccgacgacaagcccgaacagcggaagaacgtattcaggtgtttcaagaagctcggagacttcgttcaaattgttgcgaatcccaccgatatagcagatgccgaggcccattgattcggccgctattgacatattttgagcggcaagcgctgcatcgatgacgctgaccataaaggtttccgtcccttcaagagaagctgtaatatctacaccctttttccgagcgattttgtcatgcctgtaaagatctgcgcaaaatacaaacagatggccgtttttttcaacatatggctggttcccggccaattccgcaagcttgcgcttcttgtccggatcggtgacaccgatgattgaatatgcttgaatatagcttgacgtcgatgcgctttgagcgctctccacaagcaggcgaacctcttcttcggtcaggagccgatctgtaaaagacctgatcgaacggtgatttaaaatagtttcaatcgttttattcatcctcttacctcctcaacctttatcatatccaatatctgcttttctctaaagcaaaacggtttggcggactgcagatggattcaatttcatatggtaaaatgatagaattgtcttactattttcgaatcggaaagggagatgacggtgaaatccgtaattgaagaattagatgcattatttccggaaatgatcgaactaaggagacattttcaccaatatccggagctttcccatcgcgaggtcaatacaccgctcaccattgcaaattacttggaaagcctcgggattggcgtgagaacgaatgtcggcggccaaggggtcgtcggtcacattaaaggcggccgccccggcaagacggtcgccttgagagccgatttcgacgctctgcctttacaggatcaaaaaaatgttccgtaccggtcgactgtccccggcgtcatgcatgcctgcgggcacgatgcccacacgtctgctctcctcacagccgcaaaagccctggcaaagcatcgaaaagacttgaagggaaatgtcgtgctgatccatcaattcggtgaagaggttacaccaggcggcgccaagccgatgattgaagccggctgtctcgaaggcgtggatgccattttcggcacccacatctgggctccgatgcccgtcggtcaagtcggtgtcaaatcaggcccgatgatggcagccgctgataaatttaaagtcacgatatccgggcggggcggacacggaggcgcgcctcacctaacgacagacgctttaatcacgggagcctcggtcgtcaaccatctccagcaaatcgtcagccgcagaatcgatccgacagaagcagccgtcttgtcgatcggaacatttcattcaggccaggcatttaacgtcattgccgaagaagcggtcattgaaggaacggtccgcaccttttcaaagcatgtccaggaaacgatcatcgccgagatcgaacgcgtaattaaaggcgtctgcgacagcaacggggcctcgttttcactcgattatgaaaaaggctaccccccctgtcgtcaaccatgaaaatgaaacggacatcgtccgtcaatgcgccaaacatgtcgtcggccctgaagccgtcatcgaactcgaaccgaatatgatcggcgaagatttctcttattatcttgaacatgtccctggatcattcttttttaccggcgcgggcaatccgcagactggagccgtttacccgcaccatcacccgatgtttgacatcgatgaaaaaggcatgctgaacgcggcgaaaattcttgtgtcggcggctctagcatttttaaaccaagactaaaaagacagcctgattcggctgtcttttttatttaaacatatagcctttatatttcgtcagctggcagctggcgttataaacgatcgcatagccgatcagcgcggacaatacagagctccctccgtagctgatgaacagaaggggaacgcccgtaaccggcatcagcccgacgttcattccgatattttggaatgtgtggatgacaatcagcgccgtatacccaacacagaaaaacgatgcaaacttgttgtacgggtgtatcttatcaatcagcacgacaagccggtaaatgagaaggaaaaacatgatgacgacaaatgtacagccgataaagccgaaactttcgccgatgacggcatagatgaaatcggtttggccttcaggaacgtatactttcaaattgttaatgcccgttccgaagatttctcctgagccgatcgccgtaacggctttttcggtctgatacgtatcattcgcgtcctgctggctcgaatcgacccatgtcatcacccggttgatctgatattgctggatatgcaatgtatcctttgaaaactccggaaaattgatcaccaaaaacagaacgagcagtacgagcgtgatgcccgatcccgcgactatgaaaatcagcttccagttcacgcctgataaaaacaccataacggcgacaaagaacatgcagataccggccgtaccggcgtcctgcattaaaatcaatccgaccggaaccgccgacactcccgcgattttcagcaacaggcgaacatcctcctgcatcgagcgcgagcctttcggacttgctttggaaatcaccgaagccagcatcataatcaggccgattttcataaattccgacggctgcagcgtgatcgtaccaaattgaaaccagctttttgcgccgtttttaatcggagcgatcgactccggactaacttttaacacgagcaacgacaagatgccgaataaatatatgtaaatgcttaacttttcaagctgctccagatcaaaatagagaaagccgacgatcaccgaaatgccgagcagataaaagaacaattgctttgccggataacccttcggtgaaaaagacggctccgcagcgtaaacagcgatcacactgattaaaaagaacatggctaatataaaaatcaaatcgccctgataatagggacttgtcgtatttttcttctggcccattataccccgccttatttcttcatcaaaagcactaactttcattatagcatgaacaaccgttcacattgcgaaaaagggtgaataaaataacagcccgcatacatcaggctgttatttgaacatatagctttgatactttgttaactggcagcttgaattgtagacaaccgcgaagccgagcaaggttgctacgactgagctgcccccatagctgaccaaaagcagcgggacgccggtcacgggcataatgccgatattcattccgatattttgaaaggtatgaatgacaattaaagcggtaaagcccgcacagaaaaatgaggcaaacctgctgaacggatgtattcggtcgatgagcacgacaagccggtaaattaagaagaaaaacataatgacaacaaaagtgcatccgacaaacccgaagctctcgccgatgacggcaaaaataaagtctgtttgcgcctcaggtacatagacttgaagatcgcttacaccatttccgaatacttttcctgaaccgatcgccatttgcgccctttcgacctgcattttatcgtcggcattctgttcgctcggattgacccaggtcataacgcggttgatttggtattgttcaaccccgagcgctcccgcaacatcgggaaatttgatgatgacatataaaatcaaagcaacggctgcaagacccgttccgaagataagagaaatcaatttccagttcacgcccgacaggaataccatcacaaggatcacaaacgcgacgatcccggctgtacccgtatcctgctctaaaatcaagccgaacggaacaatgatgataccggcgattttcagcagaaaaatccagtcttctttcaacgtacgcttgccgacagggccgtttttagacatgaaggaagccaagtacatgatcagcccgattttcataaattccgacggctgcagcgtaaacccgggaagcataaaccagcttttggcaccgttgatgaccggcgcaaacctgtatgatccgatatatgccggactgaactttaacacgatcagcatcaaaatgccgagcagatagaaataaaagctgagcttttcaagctgctccaaatcaaaataaagaaacacgatgatgatgaaggcccccagtaaatagtaaaggcactgtttcatcgcaaagggttcattatattgattaaactgctgagcagcgtacacagccacaacgcttatgataaaaaagacaatatagacaaaaatcaaatccccctggtaaaagggatttgtaatattctttttctgactcattcgaaatcccgcccttataatatgacacaatgaattaatgcaggaagacggcatccgcttcctcacaaatgatatgacgtacaaaagaacaaaatgtttcgattttattgcgaacaaattcctattctattttaaaggatttttccaactattgtcgaatgtgataaattcattgatttttgcttgaaatgtattaaaatgagtaatgttgcataaaattaaacttttgcctccggcagaagtggtacagaatcaccaattcataaggagtttttcatttggataaagcacttcaaaagcgtaaacggcttgatatcataaaatttttggtcccttcgcttatcggaattattctgtttatgattcccgttaaaattgaaggaaatttaacgattccaattgctgttttttcaaatgcattgcaggagctgcttcagcagcaattgccgctgatcatgacggtcatcgtaaccgcaacatttatcttaacctttatcaccaaaacctttcatccggctttcatcaaaaaaagcgagtttttctataacctgctgaatgtatctttattttggtatatcgtccgcctagtcggcatgattttcgccgtgatggcgtactttaagatcggacctgaagcggtgtatgccaagagtaccggcggaacattattattcagcctgcttcccgttctcttctccgtctttctatttgcaggcctttttctgccgtttctgttgaatttcggcttgctcgaactgtgcggcgctttgatgaaaaacctgatgaggcctgtctttaagctgccggggcggtcatcgatcgattgtatggcttcatggctcggcgacggcacgatcggcgtgctcctgacgagcaaacagtatgaagaaggattctacacgaagcgtgaggccgccgtcatcggcacgactttctcagtcgtctccatcacgttttgccttgtgattatttcacaggttggccttcctcatatgttcgttccgttttatttgacgatattgctggcgggtgccgcagctgcggtgatcagcccgcggattccgcctttatcaagaaaggctgatacttatattacagatcaagcggatcaggatcaagagaagattcccgaaggatacactccgttccaatgggggctcagccaggctgtcgcaaaagcaaaacaaaatacaagcgtcaaagatttcttgcaggacggggctaaaaacgtactcgatatgtggatgggcgtcgctcccgtcgtcatggcgctcggcacagccgcgctgattgtcgctgaatatacgccggttttcaaatggcttggactgccgttcattcctcttctcgagctgctgcaggttcctgaagccgctgaggcctcacaaacgcttgtcgtcgggtttgccgacatgttcctgccgtccgtgctcggaagcggcattgaaagtgaaatgaccaggttcatcatcgcctgtgtatcggttacacaattaatctacatgtccgaagtcggcggccttttgctaggttccaaaatcccggtgacgttccttgacctcgtcttgatttttctcgttcggacgcttattacgctgcctgtcattgtactgtgtgccaactttattttttagacaaataaaaggctcccggcgccaaatgccgagggccttttttgtttagaaaaaaatcgttgatccaaggggtctgcggccttatcgtacgatccgcctgtccgcttcttcgcttcccgtaagcctgccggcctcgtataggaaacgcgcggttcttggctaactttcgcatgatcaatctcctccacgcattttcgctattcacttcttctccccttcaccctttatgtcctaactgaatcaccgtgaaaattgagccgatagttggagcggaaaatgctttccagtatgtatcatttttcgaagaacgtggtataataaatgtaacagaatgttcacaaaatattctccaattagacacaattgatgtttcattccgctttttttgacagcgctatcattatcgaaaggggctgaaaacgcatggatatgtttttcgcttacttgctgattgcaagcgccactcctttatttttatggctggacaacaaaaaggtcgcaatttcttctattccgcccatcattttaatgtgggtattcttctttttctatatgaccagcagcctttctcctacaggacactctctcatgatcgcactctttattctcaacgttgtcatcgcccatgtcgccgctttcatcatctacggacttccattgatccggaagcacatgagccgataaaaaaagtgccggtttttccgccggcgcttttttgctgttaaacgcaactatagatcaaagttaaatgttgaatgcgagtaatctttgatgaatgtttgataccggctgctgaagtcaagcaggcggtatattttcgatttttccgcaaaccgcttatggttgtctctggccggataataaacggacatgccgcttcctcttggatgctccggagatttgatgttcatgatgacagccttcttgacggattttacgacctcttttgcttctttctcggctccgatctgctgaccgatcaagcttgacaaatccgccaaatcaaccatatccgattcatctgcataatcttcagcagcgagacgcgcgtagtggagcaggcgctttccgtcaggctctttcaatgccaggttcatgtttacgctcaatctgtcgagggcatcgacagcgtctttgacacggttcaattgaattaaagactgctgcaggtcttctgtttcaccgttttcttttgactgctgtacgtagcctgcagcgatttccctgccaagctctttcggatcgattgaagggtcgtcttgtacagactgcagcgcccttttataatcccagccgttttgattcgtatagtcgactgaagccagcatgtacttaccataatccctcaaggcatatgccgtttcaatcccggccattttgcagttgtcaaaaccgattaaatcaaacttttgcttcgtatgttcataggccgttttgattcccgactgcagctcgcttattttcattttcttattgccgaagttttcgtctcccccgtagccgtcaactgagccaagcccatgcccccaaaagatcaatacatattttttagccggatatgttttgactccccatgtgataaaatctgtgacggagccgggactgtccatatttttcttcccgacattttcgaggggcaccagcttctgatgttcaactttccacctctgattcaccttgtgactgatcgacgggttcgcccatttttttgctcctcctgtctgaagaacgacattgacgtttgaagatgaacccgcatccatcatttcctgaatgtcatcgcttgccatatgaaaatcgctttccatgtcagaaccaatcatataaacaagaatagtatagtcgtccttttcttttaatagagcggctggtgccggctgaaaaaaggcgaatgaaataacggaaaacaaaatccatttgatcaagttcatcttcttatgctccttatttaagattccgggaaataaataagagagtagtagcagtcttcgtccggctgttcgtgttccaatgaatacccgacggatcggaagcacgctaagcacctcttgttatcctcttcaattccggcgaaccatttgttgatccggctcatttccggcaatgccatcgtccttttgatgagcgcttttccatatccccctccgcgcaaaaacggatcgactaaaagggcaatgttcccggtcaagtcctcctcaacttcaaccatgacaacgccgacaggcttgccgtcctctaaagccgcccatacccggtagttttcattaccgcctgcaaaattgaaccattcgtcaagagggagcatcccttccagccgccttttcacctctgcatcctcaaaccaggtctgcagccattcaatatcttcttttcgaaaaagacgaagttcttctatattgctcattgctttctcctttattgcgcgtatttttcagcttgcaggcgataaagctctgcgtactgtgcctgatttttcatcaattcttgatgggttccggcctccgccacccttcctttttctaaaaagatgatgtggtcggcaaaacgggccgtgcttaaccggtgcgagacaataatgactgttttgccctgcgtcagcttttgcagcttatcaaatatctcttcctcaataaatacatccagcgcagaagagggttcatcaaatattaaaatgtcggcacactcatcacgcataaatgcgcgggatatggcgatccgctgccattctccccccgacaaattcctgccgccgaacaatctgccaagctctgtttcatagccgtcttcaagcttatgcaaaaactgatccactccgccgaaagccgaagcactttttattttggccaagtcggtgcatgaagaaatgtcgcccagaccgatattgtatttcaatgtcatttcgtaccgcaaaaaatcctgaaacacggccgcggcatttgaccggtaatgctctatatcatacttataaagcggtaaaccattatacgagatcgtgccttgattgggatcaaaataacgcagaagcaatttaacgagtgtgcttttgcctgatccgttttctcccacgagaacggtcgtcttattcaatggaatatcaaactgttgaatatcaagtaccgttttggttccatcataagaaaattccacttgatcacatgtaaatcctttttgcttttgaacagctggagcggtttccccattttccatggaatttttgctgtttaaaaaagaatgcacatttccgaggtgcctcgtttctcttgctccgatcgcaaaagcagcgaacatttcattgattccttcattgaactgaaccgcggctccgataaacagcatcacatccccgatggataatcccccatgaaaagcctggtgaacgatgtaaatcaggacggcacctgcggccaaagattgtaataccgaccagaacagctgatacagcgccagttttttttgatcgttggacagcgtatggaggagctccatcgaggtgtttttataaaaggatttaaaaaaaggaacaagattgtatatcttgacctctccggctgtttcagacataagagggacacctgcataatattccgcgcgccgcctcagttcctgaacctctttccgtccttcaaaggtcgcgttgtttaacttcgcctcccagtacagtttgggaacggccaatatgagaaacagcagcggcacccacggtgcagccatgccaatcaataaactgctggctgcaatcatcaccattccgccgaaggtttgagacacgatggaaacccacatcgtgacaaaatattcattatagcggatgatttgtgtattggtatgaaaagatgcgtcttcaaaagccgcgatatcaggaatggaaattgcctttttcatgagcatttcatcaagataagcttcgagcttggcggtaaggagccttttctgcatttcagctacaggctgaagggcatctacgatcagcgtaaaagcaatgtatgcaaaggccgcccaaaccagtgcattccaagaagacagctcaaacggcgcccgtgcaatctcatcgatcacctctgcactcagccagactaggagaggtccgagcattgcattcagcagtgtaattaaaaacagaaccgccgacttaaaaggatcgcagcgccaaaacaacgttaaaccgtaaaatatgatggaagcggtttgaggcagctttttgaaaaacgaataaaatttcagcaatatacctcatccttcccctgaaacgatttggcctgcatgcggaacattctgctgtattccccgttcttgtccataagttcctgatggcttccctcttctgcgattcttccgtttttcaaaaccagtatgcggtcagccatctttaccgtactgaaccgatgggaaatcatgatcaccgtttttccctctgtgaagctttgaaactgccggaaaatatcatattcagcccgaatatccaaagatgcggccggctcgtccaatatgacaagtccggcatctttcataaacgatctggctaaagcgatccgctgccattggcctccagaaaaatcggtgccgccccattcagggccgatcattgtttccagcccttcaggcaactcttcgacaatcggttccagcttggcggcccgagcggcggcgcgaagtttttcttcatcgcctaaagcttccgttcggcctatcgcgatattgtgccggagtgacaattcgtatctgccaaactcctgaaacacgaccgccattttgtttctcagctgttgaagatcgaccttgcggatgtctttgccgttcactttaatctcaccctcatcatactcataaaaacggcagagcagtttgatgagcgttgttttcccagatccattcgcccctacaatggcaattctttctcccggtgatactgaaaagctaattcgattcagaacatagcctgtgtgcatgtcatacgattcaggctgttcgtcttgtccccgcatctcttcatcttcaagctcatcgagcatatccaagtcttcctcatccacatcagcttcatttacccgggagccggcagccgcttctctgaaaggatagcggaaggtgacatttttgaattcgactgccagcggtccttcgccctcgagagattcgccattggaaggaagcctgatatccttttcggcgttcataaaaagaaaaaagtctcttcccattctccatatatccaacgtatctgcaccttctttggcgatatcccggagtgccgttgataattggaacacggcccccaagtacagcgatatatcccccacagaaaaactgcttgaatgggattgggacagaatccaaaagtaccccaaacccgttcccgcccccgataagaaacccgttaaaaccgaccagcgcgcgcttctgacctgaatattccgcagcacagaatataggcctttaaaagcagattgatataaatcaagaaagaaagaccccaggccaaaaaggcgtacttctttggccgatcgtctcccgagcagaatgtggcgcgcatatgcggccctccttcttacaggggcataatccttgtgatattcccactccatttcattgtaatgattatggacaaaagcaaatggagcggtcgacaaaataaggatgaaagcaaggacgggcgacagataggcgatgatcaaaacgacgcccgccaaagacataacggcggtcaccaagttcgaactgatattaatgaattgggaaggaagccatgtcgaacgatcccgcagtgtttccagccggtccctgtactttggatcctcaaaaaaacgcatccccggaatgcggtcaaaagcgtcgatcaacaaactgttgactgtgatcatcgacctctcagaaagcattgccttcacccatttttccaatgatttaacgacactgaccatgaccaggcttcccgcataaatgacagcccatatttctgcatagatgacggcttcctgatcgacaatgccgtcgatcatttgctttgaagcgtacaattggattaaaggtgctccggcttcgatcagcatgaagataaccatgcaaatcatcagccgcggaccggatttccagaccattttcccaagcaggcccgccgtttgcagcggctcttgaatatgcttcatcttccacacatgcttcaccttcattttctatacctattgtggtcattgatacgagtatattttggctttctccggcgtattgacggtttcgatatcagccatgacccttggctttaccggacggctccggtcgagaaggtgctccttccccttggatgcttctcttagccatatttccaagtcaataacagatctcatgtactgatagcccatgcccagatcattatttggatcttcagagcggatagccatagccagcaagtgtttccaccatatatcgcgcttaatgatgccgagttcttcaacgaagacgcgctctcccggctcaaataactgaagaacgtgtctgcggtcattcataaagcttttcctggccatatgggcatatgttgttttcgttgatctgttataaacataggcaggcaggatatcggtgaaagatttgcgaagaagcattttagagcctgcataatgttcttcaagcccttttaaaacatcaaaatgctgttcaggcggtacagaaaatgagaactcgatcagccgccggtccaaaaatggatggtacgtatgcaatgtcacaccaacagcatccatgtacctcgctctcggccacaaaaagtcatagtgaaacctcttgccccacactgagagctcccggctttttcgatagcgtagatgatcctctttattgatctcccattctctctttcggtgttcttcagtgaaatattcaggcagctcatattccgtatctgaccacagcaggtcgtaatagagcttttctccaatataaggcatgaaaggggcgattccgtattgaaatccgagcttcagcatctctttcatgctgccgcctgaccattcgcgaagcaatttgtagatttcagaaaaccgtctctgccgaagcaaggaatcgatcactgacacttctccgctaaaaatgaaatccccgccctcacctgtaaggacagacgaggcaccatactcctcagcgatcactgtaaaagtctcattaaccagtgaattggctctcggatcaggaccgtctacaaaccaaagcggatcacgcccaatttccgcgtttggaattttggctgtagcgtctccaagaatgatcaggccggggatatccatatctcgcatcatattctttacaaggtccctgtcgtggcttaatatcatgtcgggttcggcaaatgatatattgacggccagcagctgttccttgcgtccgcctgcaactgcggcggcggttacggcagctgaatccagtccgccgcttaattcgacaatatgcctttcatcctttaaacgatctgctgtcacttcctgaaaaagctcccggaacctcggaacagcgtctccagcaagatctttctcgtttaatagctgcggaagcccccaatagctgtgcacgtgaaccgcttgatcccggccgagaaaagcgtaggacgccgcaggcactttgcgtattcctttaaaaaacgtccgatcttcaaagccgttttctcctacagcaaagcccgaagtaggaaacattctgcacacatcttgatcgatcgcaaaaggaatgtcatgaacaagcaaaaggatgcgcatgtcattcgctgcataccattctcctttcggactgacccagtagtaaaccggacgggttgcgtatgtatcagtcgccaaaacaaggctatgcagactgtcatcccaccagaccatcgtatattcgccatgcgagtgagacagcatggcagctttgtcctgcttcaatgatgcgtacagcttgtcatattgctcgatctttcgggtgccatccgattttgcgttaagaccgccgctgatccagccgtctaagatgacggggtgcaaaagatttatttgagttgaaggtctaaaagcttcatcgtatcggatatgcgcttcagccatgtttgcgatcccgcagctgtagctatgaatccgttccgcccgtccccatttcttgacggcggaaacccactcttgccataaagcggtgttgtttccctgcattccaaaccatattttcatactagagataacacccacctttcagcgtaagcgctcatcttatatgtctgtaaaacttttaaattcttatttttatgattcggatcgatcgatttgccgttttccatttgaacccacgcgtgagaaaacagcttgtcatcaattttcttgaccccgatcatgagatcagcatcagacccattgctgaataatatagattgaatcgttaatgcaatagaaacgcatgaagtgaccaaatggtcgtcttcatcaagggaatacaaatattcgccgttccggtgcagttcgtctatatcaagaagccctgcacctctttgctttgcgctcgcatacagcggaaacaggtggatcgcaattttttcataagcttcttcaaagtcataatttaacagcatcatacgtacaaaagcatgaacggttgtaaaatattcgtggtttttgacaagcgctctttttttcatcagcttttatcctctattttaatgagcttatgatgtgtcagttcctgtatcgcctcatttaatatcgctgatagttcttcttccgtctgatcgaacgccgattgccacttgatcagaatatcttttttatcctttcgctcattttcaatttcgatccacagctcttttaaagccccttccaatccgaaatactgcccattgtccaggtttaggacgatgcattcattttccaacacggttgtcgctgtctcttgatttcgaataattttcaaagattagacctccccggtatgcatgatttcagaaaaataaaggagaagagagccggcaagctctctttcagcactttatgcatgatgttctttccacgccctcgttatcatttcagcgctggagcgttttaaaaagagcctgcaatgcgacgatgcccctgaatttaccaactgatcacatgaatcagattatcacaggacaatattaaaaaaaccgcaaaaaactaccgaaaaccgacatgattagccaatggcatcaatgggccattattacgggatttattcggaggaaaaagaaaaagagagcctatcgactctcttttgcagggaaaaacgaatatatactttgtctatactttctgcttgatcaaattaagcatcgtccctttttttactgcgcagtaccgcgacgttactttgagctttttatagattttgctcaagtgatactctacgttccgcgtcgacatttgcaggtctgctgcgatctctttatttgttttaccgctggccaccttctgcaaaatatccagttctgtgtctgttaaatgctcgtccaccgagagatcggagtcgagcctcagtttttgcagcaagccgtcgggaaataacacagccccttttaaacacaataaaatactcgaagctatcatgctgtctgtatacgatttatctataaaccctttaactccggcctcgatcaacttattaaaatatgagtgaatttcatctcccgaaaacataatgataattttggattgaggttcgatttccagcgttttaagagacagttccaacccgttcatccccggcatttttaaatcataaagaaaaacgtctatatgtacctcttggttttttaagaggtcgagagcttcatttccttcgtggcaaacgatgacatccatattatatttttttaatatttccttcattccggatgtcagaaccctgtagtcgtctactaacaacacgcgtatcatcagtaacactctccttaaatcagtttcctccgaacaaataccgcaataaaaaccccatgaatagaattgaaggatgatgtcgggttttagtgcctttttgtggtttttaccactatattctatgatagcatgattatgtaatcaactggaagtaataaggaggtgacacagatgcgcaaattggaaagtgctcaagttaaaagctatggttcattcctgactgttactctttctaaaaagagcaagccgggcgacggcaaattcggccgcggcgtaaaacgcggttaagagtgtatgaaaaagagtgcggatagttgaaatccgcactcttttgccaatcaattaatgtccgctgtgctcagaatgttttgcacctggagaaccgccctcagggttgtctccgtgatagttgtgagcagcgaagatccagacggaaccggcaataatcgcaaccgcaataaacgcggcaaacagcgtattcccgacttggattttgccgctgtcactctcagtcatatgcataaacattaagagctgaagtccagcttgaatgatcgcaaaaccgaaaataatccacagctttgcagccatgcttaaatccgtatagatcacccacaaggccaataaggtcagcacaatggacaacacgaacccgacaatatgcttccaaggaaagtggctgtgttcagccgattgttttgctgccattatacattcaccaaccctatcaaatagacaccggtaaagatgaagatccataccacgtctaagaagtgccaatacaaacttgagataaacagcttagcagacgtttgcggggtgaggccgcgctttttcgtctgaagcaatatgccgataatccagaagataccaatcgatacgtgcagtccgtgggttcccaatagaacaaagaatgctgaccagtaagcacttgtcgataaagtggcaccttcgtgtacataatgattgaactcataaagctcatagctgacaaagccagcaccgagcaacagggtaatgatcatccagatcatcacgcctttcaaactgccgcggcgcatttcatgcactgcaatgccgcatgtgaaactgctcgttaacagcaggaacgtcatgattaaaacgagcttcgcgtcgaacagttctgccggcagtacgcctcccgctgttctgttatgaagaacagcataggtcgcaaataacgtagagaataaagcaatctccgctccaagaaaaatccaaaagccaaggatattcaaccttccgatttcagaacggtattccataggagcgttagaattgctgtgttctgcatgttccatcaatcccgcctcctttacttggcattctttcgttcagtctcttttatttcctcaacacttacatagtagccgtcgtcatattcatatgaacgaagaatcatacagaggaatacaccgatcagaccgacgattcccatccagaaccattcaaagacaagcccgaatccagcaaatccgaagcataatgacatgataaacggacggcctgaattgctcggcatatgaatctttttaaacttgctttcaggatgaatctcgacattgtcttccttcatttgcgcaaatgcgtcaggtgaagtgacctcaggcagaaccgcaaagttatagtgcggcgggatcgcagaagatgtagcccattcaagcgtgcgacccattccccaagcatctcctgattcctcgcgttttgaatgacggaagctgtagaaaatgttatagcagagaacgatgaatcctgcggccatcagcaatgcgccgaatgtcgcaatcatgttcaatgcagtccagccgtcttctgctccgtatgtgtaaatacggcgaggcattccctgcaatccaaggaaatacatcgggaagaaacagatgttaaagcccgtcatgaacagccagaagaaccattttccgatgcgttcgttcagtttgtgaccgaacattttcggataccagaagatcaatccggcgaaacatgcaaacacagtacccgcgatcagcacgtagtggaagtgcgatacgaggaagtatgtgttgtgatattgataatccgcagctgccatcgcaagcataacgcccgtaacaccgccgatgacgaagttcggaataaatgcaagcgaccacagcatcggcgttgtgattttaattctgcctcgatgcagcgtcaacagccagttaaagattttaaccccggtcggcaccgatatcgccattgtcgtaatcgagaagaacgagttgaccgccgcgctgttgcccattgtgaaaaagtggtgcagccaaacgataaagctgagaaccgaaatcgccacaatggaataaaccatcgctttatagccgaacagctgctttctcgcaaatgttgcaatgatttctgaaaaaataccgaaagcaggcaaaataacgatgtaaacctcaggatgtccccaaatccagaacaggttcgcccatagcatcggcataccgccgtttgccaaagtgaaaaaggctgttccgaacaagcggtcaaatgtcatcagcgccaaagccactgtcaagacagggaaggcgaaaatgataatcacacaagtgatcagcgttgtccaagtgaacatcggcatccgccatagagtcatgccttttgtacgcattttcaggatggtaaccataaagttgatcccggtgagaagcgtaccgatacccgcgatctgaagtccgagcaagtaatagttctgtccaggtccaggactcagctcgttgcctgcaagcggcatgtaagccgtccatcctgcattcggcgatccgccgatgacgaatgaaatgttaaacagcatcgctccgaccatgaaggtccagaagctcaagttgttcaagtaaggataagcaacgtcccgcgcaccgatttgaagcggtacgaccacgttcattaacccaataagaaacggcatcgccatgaagatgatcatgatcgtaccgtgagtcgtaaatacttcattatagtggttggaatctaaaaagccgttattaggaagcgtgagctgggcacgcatcattaacccgtcgacaccgccgcggaagaacataatgactgcggcaatgatgtacatgattcctaaacgtttatgatcgacggtggtaatccactctctccaaagccatttccattttttgaagtatgtcagcacaaatacgattgcaattgaagtaagcaaaatggaaatctgtgctccaagaattaatgggtcacctgtaattatgaattcgtcccatttcaaattcatgcaagcttcctcctttcctagtgagaatcttggtcttcagattgtttttgatctttgtttgtctttacgttttcaaacggatctgatttagagtgcggagacaacggtttatagcccagtctttcgcgcgctttaatggcgtattccgcatcatttccgtgattaacgtacttcaggtgtgtagatgagaacgtcatttcgtccgcatgctgaggaagcatcagttcatcgtactgggttttcgtcagcttgggagcttctttctgcgttttcttcacccagtcattaaacttgctttcagataccgcattgacattaaacttttgttctgcaaaaccttcgcctgtgaagtttgcatttcggcctttataagtaccctcatggtctgcctgtaaatattgctccatttccattccggacatggcgtatttttgcccgccaagctgcggaatccacagagatgccatagagtcggcagatgagattttaaacaagatcggtctgtctgtcgggatattcaaatagttgaccgtttcgatatcctgttccggatagctgaatacccatttccaatcgacagatgtagcatatacgaccaaaggttccttgtcctttgatgcttttggagcctcttctagagaataaattgtttgaactgtcggcactgacagcgcaataacaattaaaatcggaaccactgtccagacgatttctaaaaatgtattgccttctacttccgggctgtaaggagactttctgtctttacgctcacggtatttcacaatcatcacagtaaaaaggacaaatacgaccgctacgataaacagcataaatccaatcgataatagaataagatctctttgctgcgaagcaaccggtcctttaggatccaataccgcgatttgactgcagccgcccaataaaaaaacggaggaaagcagagtcagcataatcagtggtttaaatgctctgaacaagaggatcaccatccttccttaatgatgtctaaaatttggtcagaatatctaagataaaaggattctgaaaaacttttttcttctaccttgctatgctatcaaaatcttcaccaattagccttatttttttcgattgttcacctttttttcacccaaatgtcacaaaatcgtcaaaatttgttcatgatattatgaataacaaaggaaaaagactggtaattttttagttctttttacacacatagcaagcgctgacaaatccctccggaacaaaaaatctgtcaaatttaggtttaccacaataaaaaactttggtcaatcattaatttcacattgttaaattttttcatggtgaatcattatccttctcccttccttttccctgctgacaaccggttttaaactaaagaacatcaaaaaagagctttcttctgtgactgaaagctcttttttatcctatataataggcgttatcgcattctagctttgatagccgttcggatgtgctttaaaccacttccacgcgctgtcaatgatcgtttccagttcggcgtacttcggctgccatccaagctctttcaccgctttttccgaagaggcgatcagctgtgccgggtctcctgcgcggcgctctgcaacctccgccggtatcggacagcctgtcactttccgggcagtttcaacgacttctttgactgagaagcccgttccgtttccgagattgtatacggcgctttctccgccgtttcgaagcctctcgacagcgagaatatgcgcgtcgaccagatccatcacatggatgtagtctctgatgcacgtgccatccggagtcggatagtcgtcgccgaaaatcataatcttgtcccgtttgcctagcgcgacttgaagaatgatcggaatcaggtgcgtttcaggctggtggtcctcgccgatcaagccgtctacatgcgccccggcaacattaaagtagcgaaggacgacatgacggattccgtatgccttttcagaccacttcagcattttttcaatggcaagcttcgtttccccgtacgggtttgtcggatccgtcggatctgtttccataatcggcacccgatccggttctccgtatgttgcagcggttgatgagaaaacaatttgcttcacatcgaactctttcatgacctttaacaggcaaacagctccgtaaacgttgttgtcataatatttgagaggatctgttacgctttctccaaccaatgaatcggccgcgaaatgcatgacagcctcaatgtcgttttcctgaaacacctttcttagaaatgcttcatcgcgcagatctccattatagaaagaagctccctttaaagccgcctcttcatgtccagtttgcaggttatcaataattacgacatcttcattgcggcttaacagttccgctacagcatggcttccaatatagcccgcccctccgcatactaatattgccaattcatttctctcctttcagcggcgttatccttctattttaaaatctataaaacgcctgtgaatctctttttcaaacaaagatgatatatttgcttttttcattttaccaccttcagcattttccggcttgcatttttcatcatttcttcaaataaaaagttgggggaaaaacgaattgagagaccttcattccattaaataccttacaaggaatagttcgggtttttatccatatcaatggttttctcttggtgaatcaacgcgattttgaggcaaaagctatacttttttcactgcatttgaaaccaatgttctttttttccacttaatgctgatcgataatagtattttcgtattacccttctttaacccatacagcaactaagcccaaagaaccctctccacccattagatctttaatctaaataaccccttcaaaccatcgattttccaatatttccacacaatgacctctcaaaaatcccttccttgtttttagaatattcaaaggatattcggctgcaattgagaaattcttaatagggaaaaatgatcatttttatttgaatactatccagtcagtaattgattgtttattattataagtaagaatctaagattttttggtttttttagtcagttatttagggaataggtaggtttatcaatgatgactttgtgaattttttatgaaatttgtcattgttttcacatggctgttgttttataacttttattgcatctcaaggaagaaccgttttttctttgaggtgaacaacgtcttatcatattggaggaagctatgaatactcaaacgaaacacaagttggacaaagattgggtgattttgatgaaggaggcgaaaaaacttgggctgcaaattgaagatgtgaaagaatttcttcgcagtcagcccatccaaagcgatgctgaaaaacagataaagcaataagcgtttaaaagcatcagttatccaaaaaaacaggcggttctgttgaatcttggtctatcaagatgatccaaccggctgttttaacgagtgttttaattgataatgacgtatttgagcagcaggcttgctgcctgtgtatagattctgtctgctccatagaaacgagcattttaaggagcagccttaccttttgccctgtacataggttgtttcactttttccagcttcactctcttaaggggtaccagaccggattgattaaggcgttttagaggcattgctgaccaacgctgatgccagcagccccatacactttcttctgtatcggtttcgattgcctttctcctgaaagggggcggagcttttggccttaatccttttgataccatcctcgggcttcctttccatactcccttttctgttaaccatccgcctatataatcggttttttcgatgttaaatatctaaaatatcaattttactgatggttgttgttatcttaaactgaattcatgacccattccagaggaggatgatgaatatggggatagcagcaatctgcggaagctcccgcgaaaacggaaatacggaagagttggtgaatcgattaggtagacggacttgatgccgataagatctacctgcgaaactatcacattgagcccgtatcggactacaggcacggcaatacagcccctttgtatcctgatgatgactacagagacctgatcagccgggtgctggagaaggatatcctgatttttgccactccgatctattagtacggaatgtcgggtttgatgaaaaactttattgaccgctggtcacagacattgattgagcacgggagatctgcatttaaacagcaaatggcgaaaaaaacggtctacgtcgcggctgtcggagacgatgatccccgcttgaaagggctgccgcttattcaacagtttcaatatatctttgattttatgaacatgacattcgacggctatttgctcggcaaagggaacaagcccggcggcgtggtgacagaccggacagcgattgtgtctgcaaatgaactgagaaggaagctggcagaggcggaaacggggcaaaagcatggcaaataaaaaggcgaacaaacggttttatttatggaaaaagcatttattcgagatgatcaggtctttcatcttatataaataaaaggctttgtgaaaattgaagaataaatccggagcttgttacatacctttgttgtatcttttcagacaaacacaaggagggtcaaagaacaaatgggagaaggcaaaatagattacagcaaagctgcggcatctccggagttccagcggttgttaaagcggaaacgggcttttattgtaccgatgacgattttctttttgctcttttatttcctgctgccggttatgacatcatacttcacatttttgaatcagccggcagtcggggccatcacgtgggcatgggttttcgcgattgctcagtttgttatgacgtggacgctgtgcattgtgtatacgaaaaaagccggtcaattcgatcaaattgcaagcgatttcaaaaagaagattggaggcgttgattcatgagtgccacagcctttattttgtttcttgccattgtcgccctcacgcttgtcattacgtatttcgccgctaaacagacaaaaacggccaatgagttttacacggcgggagggggacttaccggcattcaaaacggactggctattgcgggagattacatgtcagcggcttctttcctcggaattgccgggatgatcgctttgaacgggtttgacggtttcttctacagcatcggcttcctcgtcgcttatttagttgtcctttatattgtggcagaaccgctccgaaacctcggcaaatttacaatggcggacatgattgcctctcgttttaaacaaaagaaaattcgcggtgtcgccgcattaaacacaatcacgatctccaccttttatatgattgcacagttagtcggcgccggcgcgctgatcaagcttctgctcggcatcgattatacgctggcagtgtgcattgtcggggttttgatgaccatctacgtcgtattcggaggaatgattgcaaccagctgggtccagatcatcaaggccgttcttttgatggcggggacgctcatcatttcggtcatcgttttttcaaaattcggcttcagcctgacgaacatgttcgaacaaatgaaaacagctactccgctcggggcggattttctaaaccccggcaataagtataaagttcctcttgaaacactttcactcaatttggcgctcgtccttggaacagccggcctgccccacattctcatccgcttttatacagtaaaagatgccaaaacggcaaggaaatcggttgtctcggcaacatggattatcggtatattttatattatgacggtctttctcggttttggtgctgccgcttttgtcggttttgaaaacattttagctgccgataaagcggggaatatggccgcaccgctgcttgctcaggcgctcggcggagattttctgttcgccttcgtctcagccatcgctttcgccacgattttggcggtagttacaggacttgtcctgtcggcggcttctgcttttgcgcatgatatatacagccagattatcagaaaaggcgcggctacggaaaaagagcaaatgattgctgcaaggtgggcttccatcggcgtatccgtcctttcaattctgcttgctgtctttgcccaatcgctgaatgtcgcgtttcttgtctcgcttgcatttgccgtggcggcaagcgccaatttgccgctcattatcttcaccgtcttctggaaaagattcaatgccgccggcgctttggccggcagcctgaccggccttttaagcgctctgatccttgtctccatcagcccgagcgtatgggacccggccggaaacgccatctttgttggagacccgctcatcccgctttccaacccgggaatcatctctattccgctcggctttttaggcgcttatcttggaacgattctatcttcaaaaacccctggtcaagacgcgtttgcagaaattcaggtcaaagcgcatacaggcatccacatggatcaatcttaaaccgtgtgcagccgaaaaaaacttatgagccggccggcccataagtttttatttattcccgaaagcttgccagccgctcgttcagcgttttcgtgtgccggtagacatctctgtaaatttgaaagagagcttcgtattgtctgctgtattcacggcggggcgaaaaggtttctttgatgagaacgaatcggtctgcacaagcctcaagcgacggaaaccagccgcacccgacggccgcaatcatggctgcaccgtatgccggcccctgttcgcttgtcagtctgatgatgtcggcgttgaagatatccgcctggatttgcagccattgattgcttttggcgcctcctccgattgaaatcacacggctgatgtcttttcccccggcacggaattgttcaatgctttcatgaagggagaatgtaatgccttcaataacggctctgacaaagtccgcccgtgtatgtgcgctgtccatcccgatgaagctggcgcgaatatctgcgtcggcatgaggagttctctcccctgacaagtaaggggtaaacagcagtcccccggccccgggacgggaatggccaatatcgctgattaattcgtcaaatgacgcctgcccggcaaatacatctttaaaccagctgaagctgcgtcctgcagaaagcgtcactcccatcgaataaaacgcatctggggctgcatggttcagaaaatgaatattgccattaaactcttgatcacggtttgattcatatgtgagaacaacccccgaggtgcctatgctgcaaagggcgggttccttcttttaaaataccggcgccgacagcgccgcatgcattatcagcgccgccggcaaacaccttgacttcaggagacagcccggtttcggccgcgaattccggtctgaggccgccgacacaagcgcccggttcaatcaaatccggacataaggactccgggatgccgagctttctgcagatttccccgctccatgtttgatgtctcacatctagcaggagcgttccggccgcatctgaatattcgctgtgaagacgccccgtcatggtgtacctgacatagtctttcggcagcaaaaaaacggccgccttttcaaacagctctttttcatattctttcacccataaaagcttcggaagggtaaaaccttcgagcgccggatttttcgcgatctcgagcaggcgctcctttccgattttgtcgttaatcagccggcattgttcggttgtccgtgtatcgttccacaggatcgcgtttcgcaaaacctctcctttgccgtttaaaagtaccaatccatgcatctgtccggaaaagctgacccctttaatctgagatgcttttcccgggaaatgcccgaccaattccttaatggcttccttcgttttgtccgcccattctgcgggatcctgttcggaataaccggaatggggctcaatgatggaaaacggtttggagacctcgccgcacagctctccccgctgattgacaaggatgattttaaccgcgctggtgccgagatcgaccccgattacgtattccactagcgtgtctcctttcctgccggcgcttcgcgcaaagcgttcaataagtaacggttaacggtcgccttcagccgttcttggcggcctgactgattttcaatatggtcgttttcaagagcgtaagcggcgagctttttcagatcggtgcggccttctttgatttcaagcccgatgcctttcgtatagctctcataacgttcttcgataacctgatcgagcgctttatcttcaagcagacgggaggcgactttcaagccgactgcatacgtatccattcctgcgatatgagcgtgaaacaagtcctcatcggcaaatgacgggcgccttactttagcatcgaagttgatgccgccggttttaaacccgcctgctttcaaaatttcatacatcgccagaaccgcagaatacagatcggtcggaaactcatcggtatcccagcccaagagcaaatcgccctggttggcatcaatggaacccagcatatcgtgcaaggcagccacccttagttcatgctcaaatgtatgcccggccaatgtcgcatggttcgcctcaagattaagtttaaaatggtcttttaaaccgtaagtttctaaaaaagcgatcgttgtggctgcatcaaaatcgtattggtgcttcgtcggctccttcggcttcggctcgattaaaaattggccgtcaaaaccgatttcacgcgcatactcaactgccattctataaaatgaagccaagttttcgagctcaagcttcatatctgtattcagcaatgtttcataaccttctcttccgccccagaacacatagttttccgctccaagctctttggcgatgtccaggccttttttcacttttgcagctgcataggcatagacgtctgcattgcaagaagttgcggccccgtggacatatctcggatgcgtaaacatattggctgtattccaaagcagctgaacatggcttgtctccatcatttctttgagaaaagacgacatttgatccaaatacgtgaaagtttcacgcaatgttgctccttcatcgacaatatcaacatcatgaaaacagaaatagggcacgccgagcttttcaaaaaattcaaaagccgcttccgccctggctttcgctttatccaaaggatgtgtcagccggttccacgcccggaacatcgtcccgtcgccgaaagggtctttcccgtccgcatcaaaggtatgccaatacgcaacagcgaagcgaaggtgttccttcatcgttttgccgccgacaaattcatcagggttgtaatatttaaatgcgtaaggattttccgaatcggccccttcatactcaatcattccgatatttctaaaaaacattccgatctcccccttcacttttccttgcaaacgttaaaaaacaatgtttgtttaaccattaaactaacttccttgtatgtattttacaggatcaattaatcgctttcaatggaaatagaggaaaaaataagttttcaaaatttgttatactataataaattcacagcttcaaagcaatggagtgattgacattgaatacagcggatcaagcccttgtaaaaaaaatgaacaaagccctgatttttgagcagattattgaaaacggacccgtctcaagggccaaactttcggaaataacaggattaaataaagcgaccgtttcctcccaagtgtcttccctgcttcaaaaggacatcatttatgaaacgggccccggcgagtcaagcggcggcagaaggcccgttatgctgaaattcaatcgaaaagccggctatgcggtcggtgtagatgtcggaaccaattatataattgttgcgttaaccgaccttgaagggcatttgattgaacaattcgaacgaacgcttgatgaagaagacattcaggcgacagaagaggcattaatcgaattgacggggcttgccgttgacaaaataccgccttccccattcggattgaccggaatcggcgtgtgcgtgcccggcttggtggacaacgaacggcatgtagtctttacgccaaataagccgatccatttgattccgataaaagaaaaactggaagaaaggttcggcgttcccattttaattgaaaacgaagccaacgccggcgccgttggcgagaaggaatacggggaaggcggccagcttgagcatgccgtgtttgtcagcattaataccgggatcggtttagggattttaatgaatggaaaattgtttagaggtgtgcaaggtttttccggagaagccgggcacatgtccattcactttgacggtccgttatgccggtgcggaaatagaggctgctgggagctttacgcttcagaaaaagccgtcttctctcactatgcagcgaattccggggcccagctttacgaaaccgttaaagaacttgcagaccgcggtgatccgggcatgatggagacgtttgaacgctttggctttcatatcggcatcgggcttctcaacatcttgaaaacgttgaatcccgacaccattatcttgcggaataccatagtggaatcctatccgagcatcgtcgatgcgatcaaaaaaacgattgcctcaagaagcgcagcagaagccttgtctaattatcatttaaaaatctccacgctcggccgcaccgcctcagcgcttgggatgtcctcccttgtaaccgaacgttttctggaacggtttatgaacgagagattttaatcttcatataaaaaagcgcatattccatttaggaatgtgcgttttgcagattttatcatcctttcagcgtgattgaaaacccttgcagtctaggaaggtcgagcatcggagcggagcgaatgttggaattcgtgagcaccgacgcgcaggcctgacaacgaatgcgagggtttctcgacacgctgaaaagcgcatattccatttaggaatgtgcgctttgtttggcagcttggactttctcgctaaacgcctcggcggcctgctttggatcggcggctttgctgatggcgctgatgacactgatgccgtccgccccggcctcgatgacggggacgcagttttcgaccgtgatcccgccgattccgaccacaggaatgccaattccctgcctgcggatctcttgaatgagcgagacgccctgcacagcttttgtatcccgctttgtttcagtagggtaaacaggccccgcaccgatgtaatccgctccatccttttccgcctttaagacttcttcaagtgtatgcgcggaaacgccgaggattttgtccccgattctcgctctgacgtctgcggccttatcatcatcctggccgatatgcacgccatctgcgtcaagttcaagcgcgagttctacatcatcgttgataataaacggtacattgaactgtttgcacagcgcctgcacctgtcgggcaaacgccgtttgatctccggctttcaacgcaccctcgcctttttcgcggaattgaaaaagggtcgcaccgccttttaaagctttttcaataacagttaaaggatcccctgcggtattgtttgaccccataataaaatagaccgacaacagatctttcattgcttcttctgagactcgcgtcatcttattccacctctctgatcctgccgcgttcttttatatccatagcttcaacggcagcaagctgattcaaaaactcgatttggaaacttccgggcccccggctttccgttttcgccgcggccaactcggccgctgttccataaaaagcggctgcagatacagcggcacggcaaacgtctttttcaacggcgcaaaacgcaccgatgacagaggtaaacaagcagcctgtccccgtcactttcgtaagcagctgatgtccgttgcccacggtatacgtttttgtaccatccgttatcacgtcttcagcaccggttatgatgactgctgtatcccataatttcgcggctttttttgcgagctccgttctgtcgccgctctcttcacccgcgtccacgcctttgatcagccagtcttccccaagcgtgttggcaatttccgcagcattgcctctgacggcagaaaccttcactttgcgcatgatcgcttgagccgattccgttcgaaacggcgtcgcccccgcaccgaccggatcaaaaataaccggcaccccatgttcattagctgactttcctgcaataatcatcgcttcaacagattcacggctgagcgtgccgatgttcagcacaagggctccggcgatctttgccatgtcggcggcctcttccctcgcatacgccatcaccggcgatgcgccgagagccagcaaaccgtttgccgtaaagttggtgacgacattgtttgtcatattgtgtacgagcggtttttgctttctgactaactcaattccccttgcggcatcttccatattcattcgcctgcattcctttctgtttttgaattctcgctccatatatacgattttgtatgatcaatccacgccctcgccgcgaacgacagatagcggtcttttctccaaatgacggcgacatgccaaggaatggccggcctcaccagcggaatgatcctcaccctttcagggtcaagatcccggcagatcctttcgggcaaaagacctatcccaaggttcgcggaaaccatttcgctgatgaaatcccattgtgaggtttcataaatgacattcggctgaaatcccgccttcaagcaggccgtaatgatccgttcgtgaagaacaaagtcttcccggaagaaaataaacggttcttcgcttaactgccgaagctcgatctcttccgcatcggcaaaacgatgggacgggtggacgattagcattaagtcttctttaacaattgtaaaggagtgaaaaatctcctcttttgcaggcaggacgacaacgccgatatcaagcgatccgtcctctactccctcctgcactttcacagacccgtgttcaacaagctgaaaggtgacgttcggatacttatctctgaaatcccctatcactttcggaaaaaaaccggagccgatcatcggcggcagaccgatcctcacatgcccttttttgacgtccatcaagtcgttcagctcagaagttaaattttgaaatgacttggtgatttcctgggcctgcacatacatgctttgccccgcatcagtcagctcgatctgccggccgcgccggtaaaacagctcgatgcccagctcttcttcaaggtttttaatcattttggaaatcgtcggctgagatatgtataatgactgagcggcttttgtgaagcttttcagacgggctacctccaagaaataggttaagtggcgtatgtccatttgtttgacaccctttcagagttcctgcgtgtattcatattctaaaccaaattcattgttttctgcacccccgcgagagccacaataaaaaaaacgccgccggcatacagccggcagcgcctatcttcgggcaatcgcctcatcctgttccttcagcgtgtccacatttgagcgggtgtcctcaatgtttttacgaacagcctctttatactgtttgaccatattgcaaatttcggcttctcgttcaagccactttttcgtaaaatcaaggttgttccgcccgagcgctccggctggcgggctttttaaagatacggcttgaagcgtgctgcttacttgttccagcttcttcataaccgctgcatggttaagtttaatcgttttgctcatttcaaccatccttttaaaccgttgattgtgctgtgcagagcgtcgacggcttcctctcctttttccatcagaaagtccgcccggtcggctgaccagcttgcagcctgaacagctcctttttcagcatctaaagcaaatatctttaaatcgattttatgaatataccgatcatactcatcggtgaaaattctgtacattgccgtgtgcgcttcatcacgtgcttcgtcaaaatcggctgccctgcttccggtccacgactcattaagattcggccgcaaaatctgcctgatttcttcgattccgaggttttgttcccgctctacatcgcgctttgcccgctccagccttgcaatttgttcttccagctctgccgccttatgggagaggacaccgtgtattttttgcagcgtgtctgagtagtccattattgtcacctctgaaattgcagtatgattcgcattgattatttccttgtcaaatcatgatccggtttgtttttcatagattcacatctttgactagacttgctctcatttccaatatttatagtttaagtcgaaaatcacggatgttgaataggctttaaagactgtttttagggatatatacacagttcgccatcatcctcacaccgcatttcaaggacatataacccgtctttttgaatcatctgtacaccgctttcattgcggacaagtctaaaggcacgggaacacggcggtttaatggtcacaaaaaatcgccaaatgattccgtatgacgttttccaattttagttattaaactgttgcttttgacctgatttgcgcttttaactatagacaaaatgaataatatatattctgtatatgtattttacctatacttgaaactcatgtacactcttgtttagaaagggggataatgacatgaaaacattcattaaaggattaggtcaggtcgctcttttgtttttattcgcccgtttcatgaatctgattgtcgaggttcttcatataaacattcccggcagcattctcgggattatcgtcatttttgcgcttctccatttcaaaatcattaagctggaatggattgaaatcggcgcgctgtggcttctcgcggagctgcttttgttcttcgtcccttcagccgtcgggattatgaactacggagatattctggctgaattcggcacaagcattatactcgttgtcctcatcagtacattcgtcgtcatggtgtcgaccggaatgctgactcaattgattgccaaaagaaaggaaagaaaaaaaacatgctcatcggatgcttaagcctgatcgcaacagttttaatctatttgggcgcaaaagcggtgtattcacgccatccaaaggtgtatgcgtcacctttattggtcacgccggtgatactggtcggcctgctgcttttcatcaacgtcccttttgaagcgtacaatgcgggcggacgcttgttgacggacatgctccagccggcaaccgtggcttttgcgattccgctgtacaaatactttccagtcttgaaaaaatacgcggttgagatcattatcaacgtggctgtaggctgctgtatcgcgatcctgtcaacagcgtttatcgcaaaactcttcaagctgaatgaagacctgatcgagagcctcgttcccagatctgtcacaacgccaattgcaatgaacgtttctgaaatgatcggcggaatgccggcggtgaccgctgtttttgtcatattgaccgccttgttcggatcagtgatcggaccgatggtcattcgctacttccggattgataatgaaatcgcgaggggcgtactgcttggcacaagcgcccacggcgcaggtacgtcaaaagcatttgagctgagctccgtgtccggaacgatctcaagcgtgtcgatgatcctggccgcgatcatcacgctttgcgcagcgccgtttctgatttcccttattgcagtgtaatagccgaaaaaaaaaccaaattggtgaaggtttttccgccaatttggttttttcatttagaaatcgatcagccatatgaatatagacatcatcaataatacaacggccagaataaaagaaatacacctaaaagacctgtcatgcagcagttttggggaaattgcttttaacagtttgacgttcagtaaaccgatcaaaccgaaaagtgtgaagactcccgatccatccgccgccatttccgagaaaaatccatcgcctttttctttggaaaatgcccacaggaatcctgcgaaagcccctgtgagaaaagcggtcgtcaacaatactttgacaaaggccatcactagattctcaacctttcagctgttcaaccgcagtctcaaattccttttcaatctctgcccgcggcttctttgtcatcaggctgacggcgatgatcacgactgtacaaacaataaatccgggaatgatttcataaaccgggtcaaacgctttcacttgctcccacacaataacggtcagcgctccggacagcatccctgcaagcgcgccccacttcgtcattcgtttccaatacaggctcagcaaaacgacagggccaaatgccgccccgaagcctgcccatgcatagccgacaagattcagaatcgtttcattcggatgaagcgccatcaagagtgcgatcagtgaaatggcgaggacagacagccttccgacaagtacaagttctttatcagaagcccctttccggataaacgctttataaaaatcctctgtcagcgcgcttgaggttacaagaagctgtgaagaaattgtgctcatcaccgctgctaatatggcggccagcaagaaccccgtaatcattgaagggaacaaaaggtcggcaagcttaatgaatatcgtctcggcattctttaacgtaagatgattcgcactgaaataggcaatgccgacgagtcctgtcagcatcgctccgcaaatcgaaaagatcatccagcccatgccgattcttctggcactcttcaattctttcacgcttgaaatcgccataaacctgacaataatatgaggctgtccaaagtagccgagaccccatgccagtaaagatatgataccgattacggttgttccttgaaacggacggaggagatccgggttaaccgcgttcacttccgaaaacgccggcgcaattccccccagttgaacaaacacgactaccggcattaagatgagcgcgataaacatgatcgtcccttgaacaaaatcggtccagctgacagccaaaaagcctccgaagagcgtataaagaatgacaaccccggccgtcagccagatgccgatccgataatccaggtggaatgcggttctgaacagctctccgcccgccaccattccggatgatgtataaaaagtgaaaaatactaaaataacaaaagccgacgtcatccgtaacagtcttgaaccgtctttaaaacggttttcgaaataatcgggtatagtaatgctgttgccggccgtttccgtatacgtccttagcctcggcgcgacatacacccagttcaaataagcgccgattgtcagaccgacaacgatccagccgctgctcaatccgttcaggaacatcgcaccgggcagccccattaatagccagccgctcatatcggaagctcctgcgcttaacgcggtaacggcgggacccagatttcttccgccaagcatgtaatcggtcaaatttgatgtcctgcgatatgcaaaatatccgatgaaaagcattcccgccatataaatacctatcgatattaaaattccgtaattcatagcttccccctgcctgtgtgatttgcgtaatatcaatatacatgaataattgaccgacaggtattgtttttatcgcaaattttttctccagccttacattaacgatggcgaacctgtaaaaagacaacttttaaataatcgccctcaggatagcttttcaccgttttaaaatcttcgggaagcgaatgctcctcaagcactgtaaagcgcgtccccgtttctttgcatgcctcttcgataaagcctttgaattttttcattccaaatgcgctgctgttcgtcgaagcgacgatcacaccttgatctttagtgattcgaatcgcgtcttttaacagatttttgtaatcctttgccgcgctgaatgtatgctttttcgttctcgcaaatgaagggggatcaaggatgacaaggtcaaaggcgagttcttttttggccgcgtattgaaaatatttaaaaacgtccatgactttaatctcatgagcttcatagtccagcccgttcacactgaattgttcgatcgtcctgcttaagctgcggtttgcaacatcaacgctcgtcgttttttcagcgcctccgagcgccgccgccacagaaaatgcgccggtatatgagaatgtgttgagcgcggttttcccttccgcataccggtccctaaccgccttgcggacatggcgctgatcgagaaaaacgccggtcatcgctccgtcattgaggtaaacggcaaaatgaatgccgttctctttcacaatgatcggaaagtctcctctttcgcctttgacaaagtcgtcatcttccacatactgcccggccgtattaaaccgttttttctcataaacagctttataatccgtcaattcatcaagggcttccataatcgtttctttaagcgtataaatccctttgctgtaccattggaacaaatagtagccgtcataatagtcaatcgtaaagccgccgattccgtcgccttccccgttaaacaaacgaaaagcggtcgtatccgggtcttgaaaaagcgattttctggcttgaaatgctttcgccagcctgcttaaaaagaatgactggtcaatcgattccccctcgtttcgagtcagaatccagccgatccctttgttttgctcgccataatagccctttcctaaaaacctgccgttttcatcggttatcctgatcagcgatccttcttttatgccgttttcttgcgaagaaacggcctctttttcgattaggggatagccctttttcatttttgcagcgaatggatgttttatttttaatgtatgcattttaattcagtccttatcttaaagtcttctctatcctaccataacgcctgatagatgttcttattcatcatgtaatcgatataattgacagatgattccgaattttctaagatgatggagaaactaaaggaggaatggcgaaatggcgcgaatcgaccacgtaggactgatggtgaaagacattgatgcttcgatcgcattctaccagaatgtgatcggaatgacgctgaaaggcagaatgacccatacaaacggcgtcatgaaactcgcttttttaggctttgagaacagagacgagacagagctcgaactgatcgagggatataacgacaaccttcctcaggaaggaaaagttcatcattttgccgtctcgaccgatgatatcgaggctgaatttgatcgcgtaaaaggcgccggcatcaagctgatggaagatgagattaccgtattgccgaacggcttccgctatttttttctttttgggcccgaaggagaaatggtcgagttttttcaaagaacataaccggacgcggcttatcgccgtttccggtttttattgaacgcggaaagccggctgctgtttttcgataaaccttttgatgttttgatatgtcatctcttcgatgcgcctgatgctctcatacgtagcgccgccgatatgcgccgtgcaaatgacattgctgagaccggcgatccgggcagccggcggttcggtttcaaagacgtccaatgctgcgcctctgatctgtttttgctcaagcgcttgaataagcgcgctttcgtccaccacttctccgcgggcaatgttgatcaggtacgcggttttcttcatttttgccagtttttcttgattgattaaatgataggtggcaggtctcaatgatgtgctgatacatacaaagtccgatttttccaggagatcgtcaagctcggcgaaccgcacattcagccgtttggctgcattgtagtctttgtatgtgccgtacgccaaaacgttcatattaaacccggcagcccgccttgcaacctttttgccgatttccccaaaaccgataagccccagcgtttttccatcgagctcatagcccatcgccgcttgccataagcccgctttgactgccgcgtttgactgcgggatcgaacgggcgccagacagcagaagaccgaatgccaaatcggcgaccgccgaggcattttggccgggtgcattcgtgacgagaatccctttttcgtttgcatattccacatcaatattgtcgattcccgcgccgaatttcatgatataccggagtcccggagcggcgtcgatcagctcccggtccgctttttcaacgccggcgatataaatatggacatccttgatatgagtcagtaaatcctgtctcgtcaaccgatttgaatccaaaaacgcaaattcggcgccgagccgttcgaccctttctctcaagcgcggcgcagcgcggtaaaacagtccgttgagcgtcaacagcactttaaccaaaagctctcctccattcagcaggaattttcccgaccagaaaaatgcttgtttccgaaggaaacaagcgaatatggggatacgtcagggtttgttgtcattatatcgattcatcctgcgatttaaaatgagattggcatgttagctgacatggtttttagacaatttggccggctggttaaaggctgtggactgcaaatacttaaaatattgacgggcgtacgggtgtgaggtgtttgaattccaaggcttgtttccgccgcagaaatgaacgattgccgggtttgcccttgtttccatatagcgcttttgatcgatgagggaagccggtgttttttcttttaaaataatgtgtgtttgggcgttccacctcggatgaagttcgagccactgatcataaagaatcgcgttcaatgcgtcttggtcatgaaacacaaacatgtcttcatcgttgttattgataaagtcgatgacttttttcgaaatgtcgttttttctccaagcttccatatcgatgatcattaagcccgagttaaaatattttgcttcatcgctgatgttcatctttttcagccgttcatgctggcctgcatcttcaaccgccgccgcgaaataaggtgaaatgtccatgtcccacagcttcgatatatcctctaaaactaaggcgtcgcagtcgacatagatcattcgtttaacggattcgtcatcaatcagatcgggaatggaaattcgatagtaagccgcttttgtaatatggctgctttcgaccgctttgtcatactggcttttttccacattaagaaatgtaataggagctccgaattggagggtcgtctcttccagacgctttttattctccggttcaatccctccgtcgatgacatacagtttcacctcgcgcgtctgatccatattcgtcagcaatgatgagaacatcacgcttaaatgctgtgcgtagttattgtctgtacaagaaataatatgcatggttcggtcgcttttcatatgtcgtccatctccttttctttttttgttctattcccttttttcgaaaaataaacaccgttgataggccgaaaaaaaaaggatcatgcaagatcctcagattgtatagcgtctattttgctatcttttagcaagatgctgctttaaataaaagtaaggatagccaacaatgataagcggagctgctaatgcaaggagtatccatgagcctgagtgactgcctctaatgactccaatgaaaatacaagtaccgacgagaaaatataataaagcacctaagaaccaatacatcttcattcctctttttctttacgcttgttcttggattgacgatttttgtatctatgcttgtctgttttttcgttcgcattgcttaatcgatcagggcactgattttttgacactttctcagttcggattccttttctttttaatgataaaattgtgagatcaatcgatttcaatgttgatcattcctttaatcaatagtgagttcctcattattttaaatgtaaatttggaaagataaaacgtacataaaggcagaatgcatatgtacgtttgggcaatgttcatatgttgggaagatctaatggttcactgcacattggtattgttgtgttccttctcttcctataaaatgattggataaatatatgttgcacgttcaatgaaatgggatcgattttcataagtctctttttggttaaactgttaaaggaagtggatgaggtttgctgataaggaatcctttcaaagaaaaatactactcacatgataggcgggcattaaatatgcttgcactcagagtgccgggcctggcttttattctcatgatctatgtcgcctctatcgtgctgcaatttcttaatgggagctggtccattttattgcttaatgtgtttacggtattgaccgccatctttgctttgttgcattggcactcatatcgctgggttaagaaaagggtgattctgtacttcgtattacaaggtttgatcacttttacacttgctaatgtcatgtcaggctttttagtgctgatcatcattggcctttatgcatttttgatcggacagattataggaatggcagacagaagaaagacgttcctcatcctttatttattgcttctgctgtcaatcactgtactatatcatattcacaaaggtgaatatttgcattttcttgtcatagcagtacctattatgatcgtgattatcacatatgccgctacattttttgcccaagtcgatgaaaagacaaaagcgcagctgactcttgaaaggctggagctggctcatcagcaggtagaacagctgacgctgcaaaacgagagacagcgtatggcccgggacttgcacgatacgcttgctcaggggctggtcagtttaaatatgcagctggacgctattcatgttcatctcgccaaagacaacacagagagagcaaaagaaatcgttcaacaatctatgaatagagtgaaaagcacactagctgatgcacgttcagcgattgacgatctgcgcagcaaatcagaagaaatcggttttttaaaagaaagaattacctcattaatggatcattttcaagagtcgacaggcatggcttgctttttagactacagattagaccaagtgccggacgttcgaacagctgaaaactgttattacatcattggagaatgcatagcgaatgccgtaaagcatgctgaagcagaaacgatctcagtgtccatttgggatgatgataagaggaggctccatttaaccgtcaaggataacggcaaaggatttgatgttgaaaaaggcaagaaaaagagaggacattatgggcttctcggcatagaagaacgcgtcagagcaatgaaaggccaattcaatataaagagtacaacatctaaaggaacacaaattgatatcactgtaccaattcagggagagatgccagatgaataaggttttaatcgttgatgaccatcttgtcgtgagggaaggtctgaagcttttaattgaaacgaatgatcactacatcatcataggagaggcggaaaatggcaaagcagcagttcgccttgcagatgaattaaaaccggatattattctcatggatttgtatatgccggagatgagcgggttagaagccattaaactaataaaagaaaaacacgacatccccatcattattttgactacgtataatgaagatcacttaatgatcgaaggaattgaattaggggcgaaaggatatctattgaaggatacaagttcagaaaccctttttcatacgatggacgcagcaataagaggaaacgtgctattgcagcctgatatcttaaaacgtctgcaagaaatccaattggagcggatgaagaagcagagcagtgatacgcagctgacagaaaaggaagtcatagttctaaaagcaattgctaaaggtcttaaaagcaaagcgattgcctttgatttgggcgtctctgagagaacagtaaagtctagactaacgtccatttacaataaattaggcgcgaattcaagaactgaagcagtgacgattgccatgcaaagaggcgttctgacattagactaataatatcaaattaaaatttgcccaaacgtacatgcccgaatgtacgttttttttatttcattgtccactacaatgagaaagaatgtgatcaagcaatgtgttgaaaggagattatcatgtcaaaaatgttatataaattaggaggatgggttgctcgcaatcgcataaaagtaatatgcgcatggatcgttgtgctagttgcttcgataggccttgcaatcacgttaaaaccaagtttttctgaggatatgtccatacctgacacaccttcggaaaaagcgatggatgtcattcaaaaagaatttccccacggtcctgataaagggagcatacgggttattttcggtgctgaagatggggagaaactgacttcgaagtcagcggaaaaagcaatagaaaatacgttaaaggaaatcgataaagatggttccgttgactcgattgcaagtccttttgtgacaggaacaatcgcgaaagatggcacagttgcctatgctgatatcaagtataaatcatcagcagatgatattaaagattactctatcaaacacttaaaagacagtttgaaaatggctgattatgaaggattgcaaactgaactaagcggagatgtaccaggagctgagatggagataggcggtatctctgaaattgtcggcattattttggcctttatcgttttggccattacgtttggctctttattaatagcaggtttgccgattttaacagcactgattggattaggtgtaagtattgggcttgttttgattgggacacaagtattcgatatcgcttccgtcagtctatcattagccggaatgattggccttgcagttggaattgattatgctttatttatttttacgaagcaccgccagtttttaggcgaaggtatacaaaaaaatgaatcaattgcgagagctacaggaacagccgggagtgcagtcgtttttgccggacttactgttatcgtagcactttgcggattgactgtcgttaacattccttttatgtctgcaatggggctgacagcaggacttagtgtactgatggctgttctcgcttcaatcacgcttgtgcctgccgtcttgtcgatagcggggaaacggatggttccgaaagcaaacaagaaaaaagaaaaacaaagcgcggaaacaaatgtctggggacgctttgtcacaaagaatcctatcatgctaagtgtatgcagcattctgattttgctcgttattagtatcccatctatgcatttggagctgggcttgcctgatgcagggatgaaagcgaaggataacccggatcgccgggcttatgacttgcttgccgacggttttggagaaggatttaatggtcaattaacaatcgtagcggatgccgcaagtgtaacagaaaataaggcggaagccttcgcagatgcagtgaaagaaataaaggaactggaccatgtagcgagtgtcactccggcaatgcctaataaagaagggaactttgccatcattacagtagttcctgaaacaggtccaaatgatgcagcaacgaaggatttggtaaaggatgtacgcagcttatcagataaaaacggagtagatttgctcgttactggatcaaccgcagtgaatattgatatttcagatcgccttaatgatgcgataccggtgtttgctgtactcattgttggttttgcgtttgtattgctgacaatcgtattccgttcgttgcttgtgcctcttgttgctgtcgcaggtttcatattgacgatgacagccactcttggaatctgtgtatttgttttacaagacgggaatctcatcgactttttcaaaatacctgaaaaagggccgatactcgcgttcctgccgattttatccattgggattctgttcggattagcgatggattatcaagtattccttgtaagcagaatgcgtgaagaatatgtaaaaacaaagaatccagtacaagccattcaggctggattaaaacacagcggtcctgttgtcaccgcagccggcctgatcatgatattcgtttttgcagggtttatctttgctggtgaagcttctattaaagccaacgggtcggctctttcctttggtgtgctctttgatgcatttattgtacgaatgacactgattccaagtctgatgaagctgatggggaatgcagcctggtatttgccaaaatggctggacaagattattccgaatgtagacatagaagggcatcaactcacgaaggaaatacagccagaaacagctcatgaacaaaagaaacaaatcagtatgtaatagaaagcagatcttttacgagatctgcttttttgcttcatacaaacgtttattttttagaaaaggttaatcgctaatatcagccatggaaaagaatcatgcatgatcctttttttctctcaccttcccggcaatccaaaacggcaaatagagaagatagaagaagacgatcgtgaccgcttcagctgataaaagataccacggccatggcccgagcacatctaacagcgatgctccgccgccgggcttcttcatcatgtacatatagttcgagttcagcaaacggttgatcaaaaaaatgagagcgccataaacattgacaagaagaaacgtgacccagagagagcgaaccgtcggcttatacctttcggctgcaatcatcaggaggcaggcgagaacgacgatcccgtgggaaatgaaaaattcaaaaaagcggaaatgaggaaagccgtaccttcccaagtcaggcgtcagaatcgcctgcagcgcgcttcccaaaccggcaaaataaagaaatttaaacaagttgaggtttttcgtcaataacagaatgatgacgagataaaccgaaaggtcgctgaggtggagcggcaaacaatagcgcggcgtccatgaatttacatagataaaccaggagtggtagctgatttcagaaatcaataaaaccgccacaaaggcatagcgaatcacccggttccaccgcggtttttgcaacgtcttgcgaaagacgaacaaacaaacgccgagcgctgcaagcaccagcaaagtcagtatatgagatgttgaaaaaaattgaaacgagccgagctgataatctttttgaaagtatgttttcatcctgagcacctgtcatcaaaatatttgaacgttattttgtgacaaaccatgatctattattcaaaaaggccgccgaatatccggcagccgggtgtcacatagaaatagaatcgttttcctctgcgttatcattgacctgaatccgttcaacctttccgacaagaaagatgtaggaaagcgctcccgcaagggcgagggctccgataaagacgagggcgggcgcaaagcttccgccgttggcgagaaagccgatgacaatcggaacgataacggaggcgaggctgccgacaaaattaaatactccgccggtcagcccgatcaaatgcttaggcgctaaagacgatacaagcacccatgtaatggaggccaaaccgtttccaaaaaaggcgagcgtcataaacaaaatgatcagagatgtctgatcgacataattggcaccgataattgaaatagacaggaacaatccggtaataatcggtgttttgcgggcaaccccggccgatacgcctcttttgatcaaaaagtcggacaggaagccggacaacagaacaccggtaaatgccgcaagaaatggaagcgaggcgagaaaaccggattggagaaaatcaaggcctctatattttacaaggtatgtcggaaaccacgtcagaaaaaaccataaagtcgaattaacggcgaactgtccgatatatatgccccacagcttgcgatgagcggtcacttgtttaaaatgcttccaagtaaatgccaatttctctttctcggaagtccggccgcggcggacgatacccccgcctttttcaatatggtcaagttcagccttgtttacctttggatgacgatcaggatcacgataaaagatataccagatcaggccccagatgatgccgatcacccctgttacaataaaaaggccgcgccagccgacgacatgctggatggcgctgagcgccggcgtcaaaaatgcaaggccggcaaattgccccgacgtataaaatgcaatggctgaagctctttcctgttcagggaaccatgaagtcaccacccggttattggtcggaaaagccggcgcttcaaacgctccggtcgcaagacgcaagccgaatagcgaaccgaagccgcggacaaacccctgaagcaatgttgcgagcgaccatgtaaccaaggtaaagccgtagacaagcctcgggccaaaccggtcgacaagcccgccgcccggtatttgcagtgcgcagtaagcccagccgaaagctgaaaaaatcaagcccaattgaacggcagacaagtttaaatcgtccccgattgcagaagctgcaacagagatattgcttcgatccatataattgatcacgacacatacaaaaataaacagcagtacccgcactctaacctttgtcggcttctcttttaaagttgtttgtttcatgacaggccctctccttttatttgattgtaatgacggacaccttttgaaaacggtatcatttttaccattcagctatgcttccgtccttgtgccgccataccggattgcgccagttgtgcccgatatcagccattttacggacgtgatcttcattgatgtccaccccaaggccaggtccatccggaatccggacatagccgtcctcatagaaaaacaccttttgatctactatataatcaagcaaatccgtccctttgttgtaatggatccctaagctttgttcctgtataaatgcattgtggcacgttgcatcaacctgaaggcatgccgccagagcgatcgggcccagcggacaatgaggggcggcggcgacatcaaatgcttccgccatcgacaggatctttttgcattcggtaattccgccggcgtgtgacaagtcaggctgaatgatatcgacatagccgtcagtcagcaggtttttaaactgccactttgaaaacatccgttctccagtcgcaatcggaattgagacgaggctggcgatatcgcggagcgcctcgttgttttccggcagaacaggctcttctataaacatcggccgaaacggttcaagctcctttgccaagatcttcgccatcggcttgtgcaccctgccgtgaaagtcaatgccgattccgatgtacgggccgaccgcttctctgactgctgatattctttcaatcacctgatcgattttttcatgtgaatcgatgtattgcagctcttccgtgccgttcattttgacggctgtaaagcctttatcaaccacctgtttggcagcgaggccgacgtcttgaggcctgtctccgccaatccatgaatagaccttgatcgattccctgttcttccctccgagcagctgatgcacgggagcgttgtaaaacttgcccttaatgtcccaaagcgcttgatcgatgcctgcaatcgcgctcatcagaatgggcccgccccgataaaacccgcctctgtacatgacattccaatggtcttcgatgttcatcgggtctttgccgatcaaatattccattaactcgcccacagccgccttaactgtcgcggcctttccctcgattaccggctctccccatcctgtaatgccttcatccgtttcgatttttaagaaaagccagcgcggcggaattaggaaacactcgaatcctgttattttcatctctgatctcccctttttactgttttgctgcttcaacaaattgctttgcttttttggacagctcttctaaaaacgcgtcattaacatctttattagcccgaacaagcgaaccgccgattcccgctccgaccgcaccggcctgcagaaactcgtgaaggttttccaatccgactcctccagtcggaagcagcggaatatgcggaagcggtccgtggatatccttgatatagccaggccccattgttccgggaaataccttgatgatgtctcccccgctttcatacgccgtcaatatttcagtcggggtaaaagcgcctggaatgctgaccgctccataccgttttgtcagcttgatcgtctcttcattgacggtcggagacaggataaaccgcgcgccggctaaaagcgccgctctcgcagattcgggatcaagtacggttcccgctccgacaagcatttcgtccccaaaatgctctgaaaccgcttcaatcgctttgatcgcttgaggggaattaagcgtaatctccacaagcctgatgccgcccgcttttaaggcgccggcaatgctcactgcctcctccggattgtatccgcggatgatcgcaatcagtttttgttcttcgatgtgtgacaataccatcatttctgccaccctttctctacggtttttttatcggctgacatcttcttcatcagattgttccataaacgcaaacagtgattcgcggtcaggcagcccttcaatatcaccgtttaccgccgctaccatggcgccgacggcacagccccgtttgacagcttctgaaagcggaatttgatcaatcaaacccgataatacgccggccgcaaagccgtctccggcacccacgggatccgctgctgcctgaatctgatagccttccgcatagccgctttcgttcccgccggcataataggcgccttttgaaccaagcttgatgatcgcagtttcagcccccagcccgcggatggcttccgcaatttttttctcatcagcggtgccgaacaaaaaacgcccttcgctcaaccccggaagcacgatatcagaccgtttgataagttcaaacatggtctgccgcgcccgctctccgtcccagagcttttttcgaaagttcggatcaaatacaacgcatttattgtgctttttggcgagctccactgcataaaacaccgcatctgaagcgctttcacttaaagccggggtaattcccgtaatgtataaaagccccgctttctcaatgtattgctcatcaatatcgcatttctttaaaaaactcgccgctgaaagcgtcctgtaatagaagacattgactttggccgcgcttttcctttctttaaaaaacaaaccggtcggcgccgcgtcatcgagcttcacctggctcacatcgactccttctcctctgacagaagaaagaatcatcgccccgaactcgtcttttccaagccgtgtaatccagccggcttttttcccgagcttcgaaagcccgatcagcgtgttggtttctgcgcccgctattctcacctgatagtttcttgcgtatctgagagggccgtcttcattcggagtgaacagcgccattgtctctcctatgctaataacatccatcagaactctctcctttgctaaagcggctttctatatccgccaatgctttctgtaatttttccggctgtgtgaagcagctgctcaacgataacggcctttcttgcgagcatgcgctcctttggcccggcggtgctgatcgccgccttcatcacgccatccggaccatagacaggcgccgccagacaaaacaaaccttcttcattttcttcattgtcaacggcatatccctgttccaaaaatgtctgcagctgcttttccagctcttctctggcagtgatggtatgcccggtaaaccggataaactccatgcggtcgagcagcccttcccttttgtcctccggcatgaatgccaaaaatgccttgccaagcccggtgcaataaagcggtttgcgcgagccgggctgtgcggttgttctgattgacctgttgttatcgatttttgcgatgtagacgagctgatcatcggatagaacggccataaacaccgtttcctgaacgccgtccatcagctgttttaaaaaaggaacgccctgcgatgaaatgtctatcgactccatggcagcggttccaacttgaatcaattttgcccccagcctgtaacgcttgacagcatcctgctgaaggtaaccttcatccaaaagtgtagcggccaaattgaatgtactgctctgaggcagcgaaagttctttgctgatttcctttacggttaatccatccggatgatttgacagcaattcaaatatacgtacaacacgtaccgcggattttactgacatgacaccctccaaaattcacatatgtgattcaaaatcaggatcctgataattcggacgtattctaaacagaaagaaggctcacgtcaaccatcctatcaaacaaaaaaatttttttattaaacttcaaattaccagtctatcgaatcatttatctgaagcatgcaggattcacccgttctgctgcgaatatctcttctcaggaaaacaagaccatcaagggggtttatgtatgaagagaaaaatgatgatgttcggattggcgctatcgatcattgcaggcggcgtggtcgccgatggaacggggaatgcagctcaagcggcccctcaggaaacagccatcgcaaaagatatcgaaaaattcagcaaaaaattcaacgagaaccgcgcctatcaaacgatttaccatttaagcgaaacgatcgggccgcgtgtgacaggcacggcagaagaaaaaaagagcgccgcttttatcgcctcacagatgaaaaagtcaaatctgaaagtaagcacacaaaagttcagcatacctgaccggctggaaggaacgcttaccgttcagggaaataacgtgcctgcgcggcctgccgccggttccgccccgactgcagcagaaggcttggccgctcctctctatgatgccggcctcggcttgcccggcgacttcacagaagaagcgaaaggaaaaatcgccgtcattttgagaggagagctgacattctatgaaaaggccaaaaacgctgctgacgcaggcgcaagcggagttatcatttataataacgtcgacagcctcgtccctctgactccgaatctaagcggtaataaagtcgatattccagttgtcggcgtcaaaaaggaagacggggaaaagctgctttctgaacaagaagcgatcctgaagctgaaagctcataaaaatcaaacctcgcaaaacgtaatcggcgtccgcaaagcaaaaggtgtcaaaaatcctgacatcgtttatgtgacttcgcattatgacagcgttccatatgcaccgggagccaatgacaatgcctccggcacttcagtcgtccttgaactggcccgaattttgaagacagtgccagccgacaaagaaattcgctttattacattcggagccgaagaaatcggactcctcggttcgcgccattatgtcagcacattgtcaaatcaggaagtcaaacggagcgttgccaactttaacttagatatggtggcgacaagctgggagaatgcttcacagctgtacatcaatacgcccgacggttcggcaaacctcgtctggcagctaagtaaagccgcttctttaagccttggaaaagacgtattatttttacatcaaggcggatcatccgaccatgtcccattccatgaagccggcatcgactcggccaactttatttggagagagccgggaacaggcgctttggagccttggtaccacaccccttacgacacgattgaacatatcagcaaagacaggctgaaaacagccggtcaaatcgcgggaacagctgtgtataacttcaccaagaaggaaaacagaaaaccgtcttacagctcagttgcccagtaattttaaaaaggagcagattgaaaatctgctcctccttcttttcatagacccaaagcgcctttcctccccaccgcttccgtatcatcaccttttcagctattcgttatctttattatcaaacaatcaataagcaaccaatatcaatttgttaatttttgtctctttgcttttccaatctccaaaagaaagcaaaaaaatggagccgcatctcgcgctccatttttcaatccttcatcagcttgataaatctgaagctcatcaaaatgctgccgatggcaaccgcaatcatgaccatccccagatcctgaaaatgccccgcggttatttcttctccaaacaacagacccagaatgacggacgaaaagatcgagccaagatagcggcatgtttgaaaaagccccgaagtcgtcccgacgatgtccggcggacttgccgtaaacatggcagcctgcagggcgacattgccgaggccgtagctgaccccgagcaaagagaggatgatgcctttccacaacatcggtgcatcgacaaaaaacaatgtgagcaggatagcgcccgctgccattaagcaagaaccaattaacacgggctgcgtttctcctgaacggtcaatccatttcccgacgaaaggcgagatcaatacgctcgtcccggacatgaacagcatcaaaagaccgctcgtttgaacggaaaggtgcatttcatcctgaaaataactcggaagtccaaaaaacaaacagtagttaaagatgttcagcataataaattgagcatagaccgaagttaacgtcctgcgtgcgatcaacagcctgatatcaataaacggactgttcactctcagctcccaccaaacaaacatcaaaagcaagacgagtccgaacatcccctcggcaaaacggggctcgcccgtgctcaatgagagcagaaatgccagcaggagaacgattccgcccgcaaacagaagaattccggtgagatcaagccgcttgatcacggcgcggacatttaagccggcttttttctcatctttcgggaacatgtacatccccagcaaaaagctgaacaaaataaatggaaagttcacgaggaagatggcgggccatcccccgagtacgattaaaaatccccccacggtcggtccaaaggcggtcattgccgaagaaaaaatggacagcacactgagtgcagacgcctgcttctcatgaatgtggcttctgatcaggcccactcccgaagggtaaatggcgccgctcccaatcgattgaaacaaacgcatgatcaacaagacggaaaaagccggtgcgagaggagcgccgattgccgatacggcaacgagaacaagccctgacaaaaacatctttttccggccgattaaatcgccaatttttcctgtgacaggctgtgcgaccgcactggctagataaaaagatgaaatcagccacgatacggttgcaaatgaaaggtgaaactcatgctggatgctgtgcagcgccaaagaaatcattgaagagttgagcggattcagcatcgtccctgatgcaacggctgttaaaaacagggcccgtttctttttcaatccggccatttacttagggtacagcagcctttcgccagctccgcccgctttaccgcccgcccccgcttccccgctcatcagacggctcctatcatcacagccgaaagcattgaggacggccccgtataaagcagcatcaagccgttgcgactcccggttcatcattgcttccgttccgttttgcaaaccgcattccgcacgtttttcaatatccgatttcatatttagacctcctcgtgctcttatcattttcttgttttcctttttcgattcatgacagtcataacctttgatacagaggagcgttcttcctcttttctgttagttgaaaaacgcatttgacggagctggcatagtgaaaagttcaaaaaaacttatcagtacgctgacaaaagaagaacgccatcgccgggccatgatttccaaaacaaaaagcggaaagaagtcgagcgtcttgccggagatcaagtgaaagtgtggattaagagcgcgctcggcaaactgcagggcaaataccgggcggacgtcttgaaattcgggtatcgaaaaagcggaagggaaatgggatgagattttcaccgaagccgatattacatatcatgttgatatcaacattgacaacttcgggtcaagcggcagaaaaaaatagcagccgggcatttctttagcccggcttccttttattgatccgcttttgttcgaatatgaagcatcttttcatccaagtagttcgcgatgtcagccgcttctttcagctcatcagtgagctggttcggcacttcattgttcaatttgtagtagattttatgctcgaggctcgcccagaaatccatcgcgatcgtcctgatttgaatctccaccttggcgtgctcgacgcggttggtcaagtaaacgggcacttctacaattaagtgaagactcctgtatccgttcggcttcggatttttaatgtagtccttcatttttaaaattttgatgtcttcatgttccttcagcacttcaaccatattgtaaatgtcggataaaaacgagcagacgattctgagaccggcgatatcattgatgtgctccttagcggcctttgtcgtaatatcgcagcccttccgcacaagcttgttaatcaggctttcaaagcttttcacccttgatttcgtatgttcaatcgggttgtggccgtgaattaaattatattcctggctgataatcgaaaacttcgtatccatttgatccaaggcaaatttatagacgaggagttcgttcttccagtcctccatcaggtttctcaaatcttctatctgggcttcaggcagtcctatcatcttatctatcgccatatccattgtatttttctccttataacatcatttcgtttcgttttttcagttaatagacgggtacctccatggtaaagtttcgacttaaagcggagatcaaaaaatagcctggtttaccattttccacatttttaaatttatacccctttcaaaagtcataaaactatcatattctgtaataccacttttcggaggtgagaatatgtcatactctaatagcttcgctttgattgttgtattatttattttgctgatcattgtgggctccgcttttgtaaagtattaattcattcgcgcacgaagccttcttccgaaaaactgcaggttcatatcgaaaggcgctccgcttttcatatgagcctgtttttttgtaatttaaaaagaatttatttccacaataacaaaaaatgtttataataggataggctctgagctgacggctgacggcgctcggaaataaaaactctcccacaaatgaaacttttatacaacattttcgtcttatactgttgttaaggcaattcaataacggaaaggaaaagatcaatgttaaataagctaagaatgttgtatgaaaaaacaacaatgaagtggctgctcaacacttcctattactttctcattctggtgctgctgtttttaatttacggattccatacagcaaatacaggttcatatatttataatgacttttaatggagaagaaaacaatgaaactgattgaaacaattaaaaaatacgcgcaaacacaacccgatacccttgcttttgtgaatgaagaagaaaagctgacatacggagagctttggtcacaatctgagcgccttgccgcaaggattcaaagcgaagctttaacagatgcttctccgatcattgtctacggacatatgaaaccggttatggcggtttccttcctggcttgtgtaaaagccgggcatccgtacattccagttgacgtatcgattccggcagaccggattctgaaaatcatcaacagttcaaaagccgagcttctgctcaataattcaggcacttcggttgacacgggagatgccctcatttccgtagtggaaccgggcgttcttgaaggagacggggtgccggagacagatcccggacgctgggtacatggggaagatactttttacattatctacacatccggaagcacgggaaatccaaaaggcgtgcaaatctcagccgataaccttcagagcttcacagattggatcacgaatgactttccggtggaaagcggccaagtgttcttaaatcaagccccgttttcctttgatttatcggtaatggacctttatccgtgcctgcagtccggaggcaccttatggacggttacgaaagacatgattaatcggccgaaactattgtttgaagcactgaaacagtccaacgtcaacgtctggacatcgacgccttcattcgcacaaatgtgcttgatggatccgtcttattcggaagagctgcttccggagctgagcttgtttatgttctgcggagaaacgcttcctgcgtcagtcgccagacagcttaaagaaagatttccaaaggctcgtgtttttaacacatacggcccgaccgaagcgaccgttgccgtcacttccatcgaagtaacagacgacgtattaaacaagtattcttctcttcccgtcggttctgaaaagcccgaaaccgaaatcgtaatcatcaatgaagacggaaaagccgtccaagacggggaaaaaggcgagatcataattaccggagcaagcgtcagcaaaggctatttaggcgaaaaagcgctgacggaaaaagcgtttttctcttacaacggctcccctgcttaccgcaccggtgacgcaggttacaaagaaaacggccagctcttcttcctcggaagactcgatttccaaatcaaactgcacggctaccggattgagcttgaagaaatcgaatatcagatcaatcagtcccgatatgtgcagtcggcagtcgttattccattctaccgcgaggagaaaatcgagtatctgatcgccatgattgtgcctgccgaacacgatttcgaaaaggaataccagttaaccagcgcgattaagaaagatttgggcagcaagctgccggcctatatgattccgagaaaattcatgtatcaaaaagagattccgatgacagcaaacggtaaaatcgaccgcaagagattaaaagaagaggtaaccgtatgacgccttatggttcatttcttttcttcattatattaggaattttactggcgccgaccatcattctcggactgaacggaaaaagcttccgcttatataatatggcggtttccgttctggttctggcgcttattttttcgaacagcctgcacgggctgatcatgctgtgcctgtttacgctttggcagacggttctgatcaaaggctatatcgcttaccgtctaaaagcgaacagcggcatcgtattttgtctggctgcagcagcttctatcctgcctctggcactgtcaaagctgctgccgtttttcgccgttgacaactgggcaacatttctcggaatctcgtatttaacttttaaaggggttcagctcatcattgaaacccgcgacggtctcattaaaaagcagctcccaatcagcagactgctttactttattctcttttttccaaccatctcgtcaggtccgatcgacaggtaccgccgttttgaaaaagacgatcagacggtttggacaaaggagcaatacgaagaactgctttacaaaggaatcaataaaatttttctcggctttttgtacaaattcattatcggctactgcattaatacgtatgtcataatgaaactgccgtttttgacttccggcagcttctcgcatggattggcatacatgtatgcgtacagcctttatctgttttttgatttcgccggatacacggcttttgcggtcggcgtcagctatatcatgggaatcaaatcccctgaaaactttaataagccgttcatcagccgcaatattaaagatttctggaaccgctggcatatgtcgctttccttctggttcagagactacgtcttcatgcgctttgtcctttggatgacgaagaaaaaatggatcacaaaccggatggctgtttccaatatcggatatgtgctgctgttccttctgatgggcgtctggcacggccttgcccctcagtacatcgtctacgggctgtatcacgcgctgctcatggtcggctttaacttctttgaaaaatggaataagaagcacaagtggtggccgaacaacaagtggacgacagccgtctcaattgtggtgaccttccactttgtatgttttggatttttaattttctcagggaaactaatacactaaaaggagattttcataatggattttaatcaagaagtactttcagttttagcagaggtatgtcaggacgatatcgtaaaggaaaatccggatattgatatattcgaagagggaatcctcgattccttcggcacggtggaattgctgctcgcattcgaaagccattttaacatcacagtgccgattacagagtttgaccgggatgcatggaacacgccaaatcaaatcataaagcagctgaatgagttgagataatgaaaaagcgttttttattcgggccaatcatcttggcatttttactttttttcaccgcgatcttgatcccaaatgcatggctgacaaagctggttcctaaagatcgcgtcgaaacttcagctacagaattaaacccgatgatgttccaggggatgtatcttcaaggcaaagcgcttgaagacccgaaatatctgccgattttcggatcatcggaattgtcccggttagatgcattccatccgtctaactattttaaagtaaacaatcaagggttcacgccttacctggtcggaaaaggcggctcacagtccttgattcacgcgatcaactttgcggcgcagtctgatcaattaaagggcaagaaaatcgttttcattatctctccgcagtggtttcaaaaacacggctcggacgaagcccactttgcgccgaacttctcggctttgcaggcatacgatcttgtgttcaatcaaaatgtcgattccgggctgaagaaaaaaatcatcaaacgcatgcttaaatttcatgcagtgaaaaatgacgctctgctttcagccctttttaaagccgagctcgaccaggacaaggtggcactgtctcttctgacgccgccggcaaaagcttaccaaagcattctggagaaaaaggacatctattattccatggttgaaggagacggaccgaagcggaccatttcccaagatgtaaaaaacaaatcgtgggatgaattaaaacagatggccgaaaaggtcggcgccaaagaatcccggaacaatgagtttaaaatctcaaacggcgtttataagaaattgaagccgaagctgaaaaagcttaaaggccataataaaaagatgaactatgccgagtccgtcgagttccacgatttccatctcatgatggatgttttgaaagaatccggcgcagaaccgctgttcatctcggttccggtccacggcaaattttacgactataccggcttccctaaaaaaggccggacggatttctataaaaagatcaaaaaagaaatcgaacaagagggctttcaagttgctgatttaacgaatcatgaatatgatccgtacttcttgaaagatacgctccaccttggctggaaaggctgggtttacgtcgatcaggagatcgaagctttttataaaaagtcatcataaaaaaggattccccgctggggagtccctttttttcctgttttaaatttttaatgtttccaaaaattctattttacaaatttctctgaaatctattgcgattatcaagagaaggtttaaaatagaagataaatattttttggaaaaagactagaaacggcagggagaatgaatatgacaaaacaaacgatcagcgtacagctcagtacagcaaaaaagcaaaagccagaggctgacaagctcgaattcggccggacctttaccgaccacatgtttatcatggactatacggctgaaaacggctggcacgatccgagaatcgttccttaccagccgattgaaatggacccggctgcaatggtttaccactacggacaatccgtttttgaaggattaaaagcttatttatcaagcgaaggcagagttcttctgttcagacctgaaaaaaacttcgagagactcaataaatccaacgaccgcctctgcattccccgggttgatcctgaaatcgttctggaagggctgaagcagctggttcagatcgacaaggaatggattcctcaagctgaggggacatccctttatatccgtccgttcattatttcaacagaaccgtaccttggcgtcgccccatccaatatgtataaaatgctgatcattttatcgccggtcggatcttattacaaagaaggcatccgccctgtgaaaattgctgttgaaagcgaatttgtccgtgctgtggcaggcggtacaggcaatgcaaaaacggccggaaactacgctgcgagcctgaaggctcaggaagttgcggaaagcaaaggcttctcacaagtgctgtggcttgacggagttgaaaagaaatacattgaagaagtaggcagcatgaacatcttcttcaaaatcagcggtgaaattgtcactccggctctaaacggaagcattttggaaggcattacgagaaactccgtcatccatctcttaaaacaatggggactctccgtaaccgaaagaaaaatttcagttgatgaactggttcaggctcacaaagacggcctgcttgaggaagcattcggcaccggaaccgccgctgtcatttcccccgtcggcgagctgatctggaaagacgaaagccttgtgatcaacaacggtcaaactggagaaatcgccaaaaggctctaccaaacgatcaccggtattcaaaaaggcgctttgcctgacacattcggctggacagttgaagttgataaagtaagccagtcctgctaagcggtttaagctctcttttgcaaaaaagagggcttgcacccttatcgtaaaattcgccggcgccaggctctgtttccaccctacttgcctctttttcaatccgacttgccatccctcccgcataaagcgattccattttatatactttatgttaaaattatcaataaccatgccggaaaggagagattatccgttctgatgtaacacgcaaatcaagaaaggacgctgaacgatggatcaaacaaaattgagcgtctgggaaaagaattacacgttccttttcatctccaggctaatcaaaatctctgctgactgttttgccttcaattctattttatggtttttaatctttgacggaaaaggtgcaatcggcacttccctgcttcttgccgtcacttttctccccgaagcctttttggcgccgattacagggcctttagtcaaaagaagcgccctgaaattctggatgtacttttcggatttaacaagggcagccgtcgtcattactataccgatttgctatttaaacggcttttcaccgatgtggtttgttttaggcctcatgatcatccattcggcaacaggcgcgacatataacccggcgtcaattacgctgattccgcagatcgtgaacgaaaatctcatccaaaaagccaacgcgattctccagtcttcttcagaaatcatcaggctgggagccgttacattgtgcggagtgctgctgacttttatcggtcctgcaacgactttggtcttttcatttatcttttatatcatatcgggcctattcatgctttgcatcaaatacagcatcacccggactcattcacagtctaagtctcttgctcaaagaggtacatattttgcgagattaaaaagaggatttacattggtgaaaaaccacaaaatattatatccgctcgcgatttattgcatcttcatgaacctggcggcttcaccctgggaagccctttccgcggtatatgttgctgaggatttaaacggaacgccgttcatccactcgctgctgaaggcgacgacggcaggaggagcatttttactgggatttatccttgcaaaagtaaaaatcaacaggtacggactcctttttattacggcaggcattctcgaaggtgcagcttattttatcgcaggactgaatactttcctgccgctcgtatttctcgccgcctttgcattcggggcagccatcagctcgattaatgtccccgaattcacgattatccagacatctgtcgaaggggatgaccagcctcaagtgtttgcagtcatccatatgatcacaaatctatcgcttcctttaggggcaattgcctgcggatatgccgcaaaaatgcttggcgcgggaaacgtgattgcaatcggcggcttcatcgaaatcattgcgggcatcggcatcctcatatttactcagcttgccagggcccggcggtcagatctgataaaagaaaaagaagctagcgcaaatatgtagtacgaatgtgacggccgcagtttcaccgggtcaggcgggcgcagcggcgcctccaacaatgaaaaggttccggcaaacacaccggaacctcaaatctattcctatgcttctacagatctaaaaaactgcggaagatgctctttatgcgcttcaagcatttcgtccagtatttgtttcgcaattttgtcggacggaacgagcgggttgatcgtcatggccacaagtgcagtgttgtaatcgcctgtaacagccgcttcagccgcaacgcgttcgaacgatttaatttgctggacaagacctctcacggtgacaggcaaatctccgaccgcgatcggtttcggcccgtttttcgtcatgacacagttgacttccactgcggagtcatcaggaatgcttgcgatcgctccgttattcatcgtgttaacaggttgaatatcgtgcttgtcattgtaaatcgagctgatcaagttgcaggcggcatcactgtaatatgcgccgccgcgcttttcaagctggggcggtttgatcgccagctccggatctttatacagctcaaacaattccttttcaacttgctgaacaacctctgcacgcgttccttccgtttttgaagcctccagttcgtgttcaagcatttcctgtgttttatagtagtagcggtggtagccgcacggaatcaggccaaggccgcggataaagtcgggttcccacgattctccggagatatttttcatcgtcatcgcattttctggatctgccatcgcttcgatcactttgtctttgacgctgacgccgtcaaggaaaacgtcgagtccgaacaccatatgatttaatcctgcaaattgaatgtctatgcggctttcatcaacatcgagcgcctttgcaacccccatcttcatgccgatcggcacattgcagagcccgacgacttttttcaaattagaatagcggagcagcgcttcagtcaccatgcctgccgggttggtaaaattgacaagccacgcgtcggggcacagttcttcgatgtcttttgcaatctcaaggatgaccggaatggtgcgaagccccttgaaaaggccgcccggtccatttgtttcctgaccgatcaccccgtattttaaaggaattcgttcatcttttgctctcgcttcgagcaagccgacgcggaattgcgtcgtgacaaaatcagcgtcttttaaagcctccctgcggtctagcgtcagatggactttgatcgggacgcctgctttttcgaccattcgcttcgccagcgtgccgacgatattaagtttttcttccccttccggtatatcgacgagccagagctcgctgaccggaagctcgtcatgccgtttgattaatccctcgacaagctcgggcgtataacttgaacctccgccaattgttacgattttcaatccttttttcatcaattgacacctccgtggatattcattttttcatagagctcgacaatctccgcggccaaatctttcatggtcatcgcattcattaaatgatcctgggcatgaatcatgagcagtgaaggttcggttttcgcacccttcgcttcattttgaatcaaagctgtctgaaagtgatgcgccctgatcagttcttcgtcagccgcccggatcttttcttttgcagctgcgaaatctccctttttggcttcggctatcgcttccatgcaaaagctcctgccgtttcctccgtgaaggataatttgaaatatcgtttgttccaattcctcggacattttggcaccccttttctatacactgacctgttgaccatcgcttgcagccgttccggtctccagttcgctctcttctttcagcttttgtttatcccacattctaaagaacggatagtatacgacaaacgagatcaacagattgatcagctgcatgaccgctccggaaattttccctcctgttgccaaatatccggaaaagccgggcggcatcgtccacggcacggcaatcccagccggctttgcaacaagacctgtgctcattccaatataggttgccgttatcatcagcagcggcgacacgatgaacgggatcagcagcatcgggttcatgacgatcggcatgccgaagataatcggttcgttgatgttaaaaacagcggggccgatggcgagtctgccgagctgtttcatttgcttgcttcgcgccctaagaaacatcgtaatgaccaaagccaaagtagcgccgctgccgccgatgttgatccaaatctcaaaaaactgcgtcgtaaatatgttcgggagcgcttctccggcttggaaagcgagacggttttcgtccatcgctccgtaccagatcggcgacatcactccgccgacaatgtttgctccatgaaggccgcaggaccacagcagcattttcacagtttcggcaataaggcttccgccgagactgccgccaaggacggaaagaggcgttcccaaaaggacgttgacgacattatggaggctttcaaacggcgtcatttcaattaaaaggcgggccgcccagatcgagccgataacggcgaatcccggaatcagagcgataaatgatttgctgacagccggcggtacgccgtccggcattttgacgacaatatccttttgaacgacccagcggtaaacctcagtggagaacatcgcgatcagcatgccgacaaacagacctttgcttcccattaatgaaatcgggatgccgcctgacactaaaatttcctctgttgcgccttcgggtgtgaacggaatctggtagggggtcgcaagcagaaaagctgctacggcaatggcgcccgatgacagggcatcgatatcatatttctccgccagacggtaggcgatgccaaacgtggcgatcagcgccataatgtcaaagctgacattaaccggatagcttaatttctcagcccattgatcgccgaaaatccccgccatgaattccggatatcccggaatcggcaaattggctaaaatgagaaacagcgatccgataatgattaatggcatggtcagaataatgccgtctctgagagcctgcaaatggcgctgggcggcaattctgccggcaaccggcatgatcttctcctctaaaaatgcattaaacttgttcacttgtgccgcctcctttaagagccggcaagctgttcggcggattttaacacttcagctccattacaagttccgtaatggaccgtattgatgacatcgacggatacacctttcgattctcctaatttctttaattgcgggagcatgtaacggacttgcgggccaagaagcaatacgtcggctttatcgatatgattctgaacctctcctccggaaacggcccagattttatagtcttttccttgttcctctgcacttttttccattttcgtcacaagcagactcgttgacattcctgcggcgcaagctaataagatattcatgttaaatagtcccccttttacgtatcttgtctgatctctcttacagtttcatcatataatgaaaccgttttcatatacacttaatgattttcctcagcgaagaggaaaaaagacaaggggacatcttcatttggcatatcgatgagccggcccgctttttttaaagacggacataaactccccgtacgttttgcatttcaggagttcccggacaatcgccctgtcatctaaaacacggcccaaaaatttgtacatctcctgcaaatttgctgtattgtccttttctacacaaagaaggcagacgaattgaaccctcttattctcccagactatcggtttttgcagcgtgcaaaccgcccaaaaagttgaagcggtttttggtgtcatcggatgcggaatcgcaaccagattgccgaagcaagtgggcgcaacggcctcccgttcaaagaccgaggcttcaagccccgcgtctgcaagccctgattgcgtcacttttccgcacagaaagcgaaggacatcctctcttgaagacagactttcccgcaaaaagacaagctcttttctcgtataagtcgaagcgattccgtcatcttcggcaagcacttgttctattttcgttaaatctccccctcccagtattgtgtttacttgaatcaccggaatgggaagatcatcggacagcggtattgtgctgataacaaagtcgagtgcatggagcgacatttgattcagcttgtagtaatcaaccgttccaaggatctcaagctttgaaccgaatgttgcccgcagtctgtcctgaagcagcatggcgcttccggcccctgaagcacagacaatcatacagcgttttgagggcctgttcatgtttcttctttccatggctgcgcctatatgcaacgcgaggtagccgacctcgctttcctgaatgtcaaatcccgtctctcttttgatgacttcaccggcttgaatacccgcttcaaatgcgagcggataattggccttaattgcatccagcattggatttctgatattcatgccgtatctgcagcgattcaaagccggttttaggtgaaggccgagaccgatttttaattctttgtcatccccaatgccgagggtgaatttttgatcgatggttttcatgatcaattgcgtcagccggtctgtctcttcttcatccatcatgctttcgattgcaccgctgcgaatggcggccataaccgtccttttcgcgccaagcaaatggatggcgatgtaggccgtttctttttctggaaacgccacgtgcagcttttgttcaagagtgcggacaatcgccctcgccacttcatattctttatgattcataatctcctttacatctttggaataaagagaaacatgtttgccgcttcggatgcgtttgcatgcaatggcgacgtggatgagaagattgtttagtccgatatctgaaagagaaatttgatcttcgcttattttttctaaaatcgtttgacggatcatagcaagctcttcttttgggagaatggatatccgggtgttcataatatcaatatccgtttcccgctttggaaaaaggtgctctgcgatgcacgatcgcagcttcatctcatctcccttcagcttaaagccgtaattcggcttgatcttcagctcaatgtcgtaaggtttaagccttttcttcacatctctcatatcgttttggaccgtcgatttgctgatatacatctcagcggctaaatcttcaagtttgacatactcctcagttaagagaagcctttttaataaatagagaatacgctcatttggaaaaacgggagtagaaagctcttgatgaaatgtgtgctgcagaagctggcgaaagaggcggtcattcttgatggagagccgatagcctgcacccctgatcgattggacggcagcgccgtttttggagagaagccggtctaattctttcacatctgatctgatcgtccgagaggtcacatttagctcattggccaaatatgcgctggttaatggtgattctgcccctatcaattcgccgaggataagcttaagccgagcattgagcatagaaaaagaccctcccactaagatacttgaaccgagaacaaacctatacactcaggtatattcattttttttgtgaaatttgtctcatagttaagtaaattctattatgactgcgctttcaagtcaatttggcctttctccaagaaaaaagccggtttaaccggctttcagattctttttctcccttcggtttttaatgattttccatgcgatcggatagatgacaggcgcccatttgacggcgcttttaatcatttttttcatggcttgactccctcctgttttttttactgttttccctgatgaacgggagccaaaccttttaactatcttgagacatagcggttcccttttatccagaatcgccaagggtattccctcgcttcacctgagttgtcaatgccaattcgcggaccgctcaaaatatcttggggttcatacccttttgcgatataaagcggcggccccgtcagcggtctgccgtaatcgttcatcgtgatggaaagcgcctttgtcagctttcccggaccgtttgtccaatcgcgcggtttctttccgctccttcgcttctccatcagcgcgaggccttcatgaggttcaagcgctctgatcagcacggcctcaggttcatcggctcctccgcttacaacattgatgagtgtgtgggtatgcatggtgtacgtatacaccacgccggcttcacgatacatgatttcggtgcgctttgtccggcggttgccatagctgtgagctgctctgtcccctggccctttataagcctctgtctccacaatatatcctgaagcaggcccttcttccgtttctttaacgagaagacagcccaacagggacctggcaagttcaattgttggcttgttgtaaaattcgagcgggagaggttcgtgagctggattcatttttgttggcctcctttttgctaaaaagcaaatcgcctctttgtcgattgtgatatattttaccattttcgacagacgagatgccagaaatgaaggcaatgatgaatgagatgatttattggtcttcagtggatgacattgacatatctgtattattgtatacaataataattatattctgaaaaaaggaggcgaaagcttttttcatgcactcttcaaatccagtcaaaagacagtctgcaagtgattacgcttataacgaattaagaacgaaaatcatcgaacttgaatatcctccctctgaacagcttgctgaagacagtcttgcaaagggtttaaacatcagcagaactcctcttcgccaggctctttaccggctggagcttgaaggattggtcagtaaacagccgaacggccggcttcgcgtatgcccgatttcgctcgctgaagcgaaagaggtttttaaagtgcgtgaagcgcttgaaggactactcactgccgaagccgcacagctggtgacgccggagagccttcatcagcttgaagaccgcatcgaactgatgaagctggctgccgtaaagggccgcaaaacagatacggtcaaatacggatcagaatttcattctatcttgcacgccatcagcacaaatgcaaccgcaaaacgttttctggatcagcttgaaagcaggattgaacggtatcgcagaatcagcggatacaaaaatcctgactacaaaccgtctgtatctttcaatgaacacttggatatttttaatgccgtcaaagaaaaaaacagcgttttggcagaagccgccatgcgttcccacattaaacgaagcttacgttcaattgaagaaacgctcgaacgttcatactaatccgccgaacagccaatgccattctcacagcacgtttttgacacaaatgttaaaaaacgaataagaggtggaaaaatgggcaaacaaggtgtatttaaaccgggattagaaggcgttattgctggagaaacgaacatttctttcttagatacggaagcggaacaaatcgtcattaaaggctatgatttaatcgaacttgcagaacaaaaaacatatcttgacctcgtctatcttctccttcaagataagctgccagatccaatggaattgaaaggaattgaaagcgctttaaaaagtgcgtatgaactgcccggcggaatctatactattctgaagtcgcttccgaataatacccatccgatggatgcgctccgaaccgggatttccgctttagcaggatatgatcccgaattgaatgacagatctcaagcagcaaacagaagcaaagcgctgcgcttgatcgcacaggttccgaatattaccgccaacagctaccgcatccttcaccagaaaaacgtcatcacgcctgacaaacagctttcattcagccagaactttttatatatgctgacggaaaaagaaccgactccccaagaaacagccgtctttgatcagacattaatgctttacagcgagcacgaaatgccgaactccacatttgccgcaagagtcatcgcatcgacaaacacagatatatacggtgctttcacaggcgctgcagcatcgctaaaaggacatttgcacggcggtgcgaatgaagcggtcatgtacatgctgctcgaaggagaaacaaaatcgggcttctgcaagctgattgaacataagttaagcagaaaagaaaaaatcatgggctttgggcaccgcgtctatatgagaaaaatggacccgcgcgcagccttgctgaaaaaggcgctctattcgctttctcataaaaccggcagacaggatttatatgagatgtgcgatgccggcgaaaagctgatgcgcgaagaaaaaggcctgtatccgaacctcgactactatgcggctccagtctattacctgctcggcataccgatcgatctctatactccgatatttttcgcggcacggtcggtcggtcttagcgcgcatgtcattgaacagcatgaagacaacaggctgttccgcccgagagttcactatacgggaccgcgtcatcttcatccataattcgctttgattcagaaagaagggagatagatgttatgaaaactgaaagtcaaacgctccaaaactgtgatcaattgctggaagagatcgccgactatacggtaaatgccaagatttcaagcgaagaagcgattgaaaccgcccgttacgtcttaatggatacactgggctgcggaatattggcgctcaaatatccggaatgcgccaagcatctcggcccgattgccccgggtaccgtcgtcccgaacggcacccgcgtcccgggaacgcaatttgagcttgatcctgttcacggcgcctttaatatcggctgcatgatccgctggctcgattataacgacacatggcttgcggccgaatggggccatccgtcagataacctcggagcgattttagcctgcgccgactatgtcagcaggcagctgctcgcggcgggcaaggaaccgctcacgattaacgatgtcctgacggcaattgttaaggctcatgaaatccaaggcgtccttgctctcgacaacagcttaaacagaaacgggcttgaccatgtgctattcgtaaaagtcgcctccactgctgtggcatgctcactattggggggcacaaaacaggatgttatcaatgccgtctcccaggcctgggtcgataattcaagcctgcggacgtaccgccatgctccgaataccggctcgcgtaagtcctgggcagccggtgatgcgactagccgcggcgtgaggctcgcgatgatgaccttgaaaggcgaaatgggatataaaaccgctttgtctgctccaatgtggggttttcaggatgtcttattcggaggaaaagaattgacgctcgccagaccgctcgactcttatgtcatcgaaaatgtcctttttaaaatttcgtatccggctgaattccacgctcaaacggctgctgaagccgcgatcaggcttcaccctgaagtgaaggacagacttgatgacatcggccaaatcgtgatcacgacgcacgaatcggccatccggattatcgacaaaacgggagaattacacaatccggctgaccgtgatcactgccttcagtatataacagcgatcggactgatctacggcgatattaccgctgaccattatgaagacgaaaccgcgcaaaatccggagatcgacaggctgcgcgaaaaaatgacgacagtcgaaaacaaacagtattccgtcgattatctcgacccggaaaaacgctcgatcgccaacgctgttcaagtgttttataaagacggcacacactcggaaaaaatcgcggtcgaatacccgattggtcatcggcgccgccgcaacgagggcatcccgctcttaaaagacaaatttatcaataatttaaaaacgcgctttccggcggggcaagcggaacgaatcaacgccctgctgaatgatcctcacagattaagcggtgcacctgtaccggatttcatggaattgtttgtcatttaggaggttttgaatatgtggattgtctcgaaacaatcaactcaggaagagctggccaatgcattcagaaaactgatgaaagcacctgatattttgaaaatacccggtgttcatgacggaatggctgccattaccgcaaaaaacatcggcttcaaagcgctctatctctccggggccgcctacacggcaagccgcgggctccctgacctcggaatgatacactcccaggaaatcgctgaaaaagcaagcgaacttgtgagagccgcaaatcttccgcttttggtcgatatcgacaccggctacggcggtgtcctaaatgcggcacgcacggccgccgaaatggccgagagcagagtcgcagccgtccaaatcgaagatcagcaactgcctaaaaaatgcggacatttaaatggaaaaacgctcgtacccgcagaggacatgatcgcaaaaattagagcgataaaagaaaccgccccttcgctcgttgtcgtggctcggacggatgcaaaagcagcagaagggatggaagccgccgtcaggcgcgccaatttatatgccgacgcgggagccgatgccatctttcctgaagcattaacgagcgcagccgaattccgggaaatggcttcttccattaaagcgccgctcctggccaatatgaccgaattcggaaaaacgccttattatacggctgacgaattccaaatgctcggctgcagcatgattatttaccctgtgacttccctgcgcgccgccgcgaaagcttatgagcgggtcttcgcggagattttcgaaaaaggcacgcaaaagggtgtgctcgatgacatgcagacacgcgaagaattatatgatgcgattcattactacgactatgaaaaactggacgaaaatattgccaaaacggtgcttcccgaaatcggaaaagaacaccgttgatacgcgaaacaaggctgccgaatgatcggcagccttctccacttacaacagctgcaacatcgcaccgccgacagcaccggctgcaacgatgatccacggcgagagcttccagtagacaagcaggctgaacaaaaccgcagcgaatgcaaaatcgatcggcgccaatacggagctggtccagatcgggtgataaaacgcggaaatcaatatccccacaacagctgcattcactcccattaaagcgccttttactttaggattgcggcgcagcgtatcccagaagggcagcgtccccagaatcagcaggaacgccggcagaaaaatcgccgctgtggcgagcaatccgccttgccagccgctgatcaccgcaccaagatatgcagcgaatgtaaacaaaggccccggaacagcttgtgcggctccatatccggccaaaaatgcctcttcacttaaccatcccgccggtacaaattcccgttctaataatggcaggacaacatgccctcctccgaagaccaaagaacccgacctgtaaaagctgtcaaacatggcaatccagccggaagatgtcatttccctgagcaccggcagcaaaatgagaagcccgaaaaacaagctgagacagaccgctgcaaaccggcgcgacacaggaaactgcatgacggaatcatccgtttcaacttgctctttatagataagatatccggcgaaagcggcgagcaggatgactccgacctgtgtaaaagccgtctgccagagaagagtggcgaccagagcaaacagcgcaatcgctttgcgccttttatcaggtgtcagcttttgcgccatccccataacggcatgggcgactacggcgacggcgacgattttcagtccatgaatccagccggctgttccaatatcgaagccttgcagaaccatggcaaataatacaagcgctatgacagatggaagagtaaacccgatgaacgctgagattccgccgaggacgccggctctcatcacgccgattccgatccccacctggctgctggcaggaccgggcagaaactggcataaagcgaccagatcggcatagtttttttcgtccatccattttcttttacggacatattcggcatgaaaatatcctaaatgtgcgatcggacctccgaatgatgtcaatccaagcctggttgaaacgaatagaatttcaagcagcgacttcaagcttctgtccgctttatgctttgtcatcattccactcccctattctttaatttctttaaacagttcatatgctttcaatctggcttccttcagtacgcttgctcctttttccgtggttgaatagtattttctgatctttccgtccacattctgttcttcttttcgaagaagtccgtcagcttccatagaatgaaggatcggatacagcgttcccgcactgatgttatatccgtgctctttcaattcctcaagcatccacaatccgaaaatcgggtgttcgctggcgtggtgcagaatatgaatttgaataaatcctagaaatagctttcgcaataccttatcttccaataccgcaccccctttaacgaaattcaatatcgaaatccgatatcgataatatataacgaaagtgtagcatccgttccctttcttttcaaggtcttttgcccttaaaaaaacaagcccaaacatgggcttgcctgtttccaatcatttacgactgatactgtacacgatgaagatttgcgaaaataccgccgcgctcaaccagttcatcatgtgtcccttcttctgcgattccattctctgtcacgaccacgatccggtcggcattgcggatcgtagcaagtctgtgggcaatgacaagcgtcgtcctgtcttttgcgagctccgtcaaagcgttttgaatcacctgctccgtctctgtgtcaagtgctgatgtggcttcgtccaatatgagaatcggcgggttttttagaaacatcctggcgatggcaatcctctgcttttggccccctgacagcttcagccccctttcgccgacctgggtttcataaccgtcggggagcgactcgatcagctgttccaaatgcgccattttggcggcccgctgaatttcttcatctgtggcatccagttttccgtaggcaatgttttcgcggagcgttcccgtaaaaagaaacacatcctgctggacgatgccgatttgcgaacggagagagcgttttgtcatatcgcgaatatcgatgccgtcaattgtgatggccccgccgtctatatcgtaaaagcgcggaatcagcgagctgatcgtcgttttgcccgctcccgacggcccgacaaaggcgacggtttctccggctttaattgacagatcgatgcctcgcaggacgggtttatgtttttcatagccgaacgtcacattcttgaagacgatgtttccttccagcgccggaacatcaatcgcatctttgcggtcgacaatctgcggctttgtatcgatcaactccgtaaaccgcttaaatcctgccattcctttaggataaagctccaaaatggcgctgattttatcaatcggcttaaacagcacgttgacataaagaacaaacccgacgaattccccgtaggacatattcccggaaaaactgagccaagctccgaacacgagcactgccagaatcatcagccgcgtcatcaaaaaggttccggcagtcgtgagagccatcgttttgtagcccttcagcttcgccttgcggaacttttgattgttttttaaaaaccgggatatctcaaagcgctcattcgtaaaagattgaacgacgcgaacgcctgaaacgctgtcctcaaccctggcattaacatcggcgatttcgctgtacatctggcgccaagcccggttcatcctgatattggaatagatgatcaagataatcaataacggcacaaacagaactgcaaccaatgcaagcttcacattaatcgtcagcataatccaaaatgcacctaaaaaggtcatcacggcgatgaacaaatcttccggtccgtgatgggccagctctccgatatcaaacagatcatttgtgatgcggctgatgatatgtcctgtttttgtattgtcaaagtagcggaaagattggcgctgtacatgttggaaaagctcctggcgcatatctgtttcaatgttgatgcccagcttatgcccgagataattgacaatgtactgcagacctgtgctgagcaggtagatcagtaagaggccgatgcttacccagacgatttcaagccagtctcccccgggaatcagcgtatcaatgaaccactgaacaactagaggaaaagccagctccagcactgcaacgacgatcgcgctgctgaaatcgatgaagaacaaacgtttatgaggtttatagtatgaaaaaaagcggcgtatcataggatgatgtgcactccttttgaaaatctttacgagattgatcgtatcacagtttggcatcggaagtgcaaaaatttcgaaaaataattgaaaattattctcaagtaggctgttttataaaggaattcccgcttcttttgcttcctgtgcaacaagcttagcgatttcttttgccccgaagtcgcaaaagtgggtgtcatccctggctccgtccggatagttggggtgttcccccggttcaagccataaatacagctttttggaagcttccggtcctagcgattcaagcaattgacggcttttgaaggcgagatcgataagcggcacccgaagctcttccgcaagctgtatcatcgcatcaggatagtcgccatgggtatttttaaagcggccatcgcttgcaaatgatcttctctggaccggtgtaatcagaacaggattggctttctttaaccgtgcctcatctatataccgggtcaaatgctgcttgtaagttgtgtatggctctgtatagcgatcatccggtttttggtcgttatgaccgaactggacaaacaaataatcgccgcttttgatctgtgttatgattcgcttcagcctgccttcttcaataaagctttttgagcttcttcctgatgccgcttcattgcggatcaaaacacctgcgcttaaaaactcgccgattttctgcccccagcctgcacgcggcgccctattctcatcataatcgcaaaccgttgagtccccggccaaaaacaactgaatgtctcgcatcatccatccccctgatccctttttatttatattaaaacgcccctcaaggaactgcaacaaatatacataattaaccattttgttctttatacgactcctttttataaaaaaaaggcgtcaattgacagaaaactatcaatttatactaatttttttagaaatttatctaaaaatatttacttggatggtaaatggtgatagattaaacaaacaagaaaaggaatatagttgatcgcgatctcatttctgccttttcttgaaaataataggacgtcctctactttaacttaaacattgcaattaggaggaacttatcgatgctaaacgaaaattcattcgtaaaatcagtgttggtctattagcttctgcagcattgttttcatttatcattcctacccaaggagcaaatgctcaagaggtgaaaacaaatcattttagaggaccgatcttttgtccgccgccattcaagccggcacctaaaccacagccgcctcaaaaaccgcagccggacaatccgcaaccggataacccgactcagaagcctgtgcttgaggcaaaaactattaacagcaataaagagtggtcaacttcagacatcgaaattacttatagaccaaacgcatttgtcggttcaagctatgttgaatttcattttccgtaccgctttcatgcaagcacaagagatacactaaatggaaaaacgcttgactatacacaaattttaaatgatggacaaacggtcagagttcctgtctatgctttaagttcctctgagttcaaactggtcatggttcggaaaacgcttccaaatgccggcactcacagaattactgctgaactgcagcaaaatggaaaaaacatcaaccatgctgaaacaactttggagattgtccctcgttaaatcaatgttcggcccgccggcatgaatgtgccggcagccgttctattgtatttttctttacatatcatgcattttttaaatgtttttagaattttcctttaaaaatatttacttgattggtaaatgatgatagattgatggagcgggaaaaggaatatagtagattccgaacttattttttcctttttcatcattttttaaaaacatttattaggaggggtaagtacatgttgaaacgtaaatttatcggtaaaattggagtcggcctattaacttcagccgcattgttttctttcattcttccgacggaagaggcgagcgccactttttacagaaacgctccgacgctgcatgtcgagacggttgacagcaataaagaatggacaacttcagacattgaagtcacttacaaaccgaacttttttgtcggttcaagctatgttgaatttaacttcccataccgcttccatgcgaatacgagagattcgctgaacggcagaacactgaactatacacagattttaaatgacgggcaaacggtcagagtgccggtttacgctttcagctcttctgagttcaaactggtcatggttaggaaaacgcttccaaacgccggcactcacagaatcaccgcggagctgcaaaagttcgggcgaaactacaaccacgcagaagctacagttgatatcctgccacggtaaaattttaagcctgccggcataagagccgccaggctttttttcatttaagcgctgcccgccgaaccagtatgttaaaacaagcgagcgcgctgatattgcaaaacagaatgacgactgccatcggcaaagctgtatggcttccggcaataccgacgagcggcgccgcggcagctcctaaaataaacggaagcagtcctagaagcgcagatgcgctcccggctgatttcccctggctctgcatggccaaggatccgctggtcgtcgtcacgattccgatgcaggaaaccacgacaaacagcgggattaaaataagaatcagcggagctttaaaaaagacagaaacaaataaaacaacgcttgcggtaaaagacagcagcaaaccgctccgcaaaagggacgcttcaccgaaccggccggcaagcctgcccgtaatctgagctgcgataataatgcccaggccgtttaatgcgaaacaaaaactaaaggcttgagccgacaatttgtaaatgtcctgcaaaacaaacggagaggccgatatatagccgaacatccccgctacgatcagcccttgcgccaaggcgtatcccataaatgtacgctggccgaagagccttccaaatgatacaaacgtctctttgaatccgcctgccgtacggttttccggagacagcgactctttaaccccgaatataacggacaaaatcatcagcaggccaaaaaggccgatgatgaaaaatacgccgttccacgtcgtccatttcatcagctgtccgcccgctaccggagatatgataggcgctatcccgttaacaagcatcaagagcgaaaagaactttgtcaattctgttccagaatatagatcacgggcaatcgcgcgtgatatgacgatgccgcctgcccccgccgcgccttgaataaagcgcatcgcgatcaaaacccatacagaagatgtcatagcacataaaaaagaggccgcggcaaaaacggacagcgacacgatcagcggaagccttcttccaaggacatcgctgaaagggccgatgacaatttggccgattgccagccccagtaaacacgatgttaaactgagctgaacgacggaagcattcgtatgtaaatcagttgccatctgtggaaggccgggcaaatataaatcgatcacaaccggaccgattcccgataaaatacccaatatgacagcgatccataccctgttcggctttgctttcgaatgagccgcaagatctgcctggctgttaagcgtacccattggatcactcctttattatatttttaaatacgccctcgaaaccttccagtgtattgtataccttaagttatgaagatgacaattagaaaaaccgggcgagcccggctgattagtaagattcatatcttttaaaaacaaaaacggtgcacatgaacaaaagaattacaattcccaaagacgaaaacaccatccagccgaaagcatggtcccatgaaccgtgcatgataaaataatcagcctggcttttcgccttatcaggcatccattcggtaaagcggggaaataaggatcccgccaatgaaacgaaggcgatgaaacagatgctcatgccggcaatccccccgatatggcgaaacagagcactgaaaaacatcgtgaccgacatgacaaatataatccatatactgtacacggataaactaaataaaaaccggtcaaattcaaccttgccgaatagcagatttgtatagtagaaagccaaaccgtagcttgcagcaaacgaaaccaatacgagcagcacctgctgaagccacttgctgccgatatactgaagcgggctgacaggtctcgccatcaccaatgaaagggatccttggtttcgttcgtggacaatgctgcccatcacactgaaaacgaaaattgccgtaccaaccgtgccgaactgggacaaggtgctcgccattacctcttcacctctcggccttggtatgtcgatcacggatccctcaggcaaattcccggccatatcgataatttgaggcatataatacaggctgagcggctgaatcaagcccagaaggatcaaaatgacaggcagccaaagcagctttccgtctctccagctttccgtccattctttttgaaataacataaaaaatgaattcatagccccatcaccttcagatacatatcttccaaggacatcgttttttgttcaaaacgaacaatcgatacttgtctgttcaagcattcagccaacagtcggcggctgtcagaccgatctgttaaataaaattcagcttgtgaaggcttatgatacacgactttgctgacataaggcaggtgttccagccatccttcaagactttcttcagctgtcagcatatatgatggctttaaatgacggttcttcaatctgtgaagcggaccagaccatttgacagccccttctttcagcatgatcacttgatcgcacacctcttcggcatcatgcagcacatgagtcgaaaataggattgtcatcttcttttttaaatccttcatcatatcaagcacttcgcgccgccccgccggatccagcgcggaaacaggttcatccaaaatcaacagcctctgctcatgaaccaaagcctgcgccagcccgagcctttgcttcatccctcctgaaaaaccgccgattttccggtcttcttccttttccagaccgacatagcgcaaagcggttcgactcttttccagggcttcacgacgtttcattttggaaagccttgcagcgaataccgtatattctaaagctgtcatccatgaaaaaaacgcaggatgctgaggcaaatatccgatttccagcctgtttatcgattctctccccaaaaagcggatgcgtcctgatgtaggggccaataaaccggaaagcatttgcaatgtggtcgtttttcccgctccgttcggcccgagaagggcaacgcattgctgatattcaaggtcaaagctgacattttggacagcttggtgctgctgatacatttttgttaagccattgacggacagcatcacacccgcctcctctcatatgtttttttaccgatgataaagtaagagacgggaccgacaaaactgatcccgaaaatgatcaaaatccacatccactttgggccattcgttttctcctgttttatgcaactgaccaatgcggacactgctaaaatgaaagacagcacaatgaaaggggcgagcagcgcccaaggtatatctgctccagtcatgataacggcctcctttttttatgaaacggccttacaacaaataaataatagaataataaaggcatcggtgtttggatcaagccccatattccccagaaccacgcattggctccctttttcttcgcattaagaaatagaaagatactctgcgcaaataaaagcggtgaaatgcaaagcagcagcagcagcagtttttcctgagtcatgtcaagattcatttaatcagcctcctcatcagccgtatgccgccttttttctatcagggcaagcgctggcagcaagataagcgccgctccctgcaccatgataaaaacagccggtacttgaacggaaatcgtcaagtaggccgataaaatcaccagcgccatgacgataaaacaaagcaattcctttttaagcgcccgcttgcgctcttgcttaaaccgcgctaaacgctgattcagttcaaatgcttgaggaaccggcggcacaaaattatcatcaattctttcgagttcgcgtttcaaatgtgtaaccgtttctttttcatctcgttcattcactgtccccactcctttcgaattttctttaatccatgatgcacgcgcgatttgacggtaccttcttttattttcagcatgtttgccacttcagggtaagtaaacccgtaatagtgtcttaacaagattggcattctgaactcaggctcaagcgcagcaaacatctccaagtattcgctccattcgtggccgtgaagggcagaattccatttcatttttcgcaaggcttcctctcctgctgcttgcgttttgcggttttcgcgttttttccggcgctgatggtcgataaacagccgggaagcaattgagatcagccatgttgaaaattttgcattgccctgaaactgatgaaggctgacatacgctttcagcatcgtttcctggaccaagtcctctgtgagatctgggttcagcgttaatttcagaacatattgatatacaaaggggtaatgaagctgaaacagtttcgtaaaagccgcatcttcaccgtcttttgcccgtatgatcagttctttttcatctgcttgatccactaaaacgcaaaccccctttctttttgtctctgtatctaggacgacgcctgcaagcaaaccgttcaattctatttcaataagataaaaaatcatcttgtttttcggccgggatttatgatgtacttgaatttaaaggggtgtgagtaaaaagggatggagcggcaaaaacaaatcgtctatgaagaaaaacaaattttaaggaaagatcatatgatcttttggggtgccgtcttttgtttctggtttgctacatacatctatgtccctgttttcggattatatttagacaacatcggattttcatattcagcgataggaatcgtacttggaagctacggcgtcactcagatattactgcgttttccgttcggcatcctgtctgatgttctttcgccgcttagaaaacagctgttgatcagcggctttgcaatgtctctgttgagctgctgcatatttctgttgtccgattcgttcatcatggtgatcacagccaggctgctcgccggtatgaccgcggcgatgtgggtgatggcaaccgttttatactcgcagtattttacaaaagatcaatcatcaaaagcgatgggcatcctgcagtttttaacggtccttccccaattcatcagcatggcagtcagcggctacctcgtccatttgttcggctggatgtttccgttttggatcggtgttgccgtatcatgcatcggactgattctgtcattttacattaaagataacgggccccgccatacggccaaggggatggctttgtcagactatgttaaacagacgttgcgtcttcctgatttaaaagcgattacaacattatcgtttttagcccacgctgtactatttatgaccgtgttcggatttacgccgatttacgcggaatcggtcggaatcgatgagaaacagctgatttgggttatgttcgccttttttgttccgcaaacgctggcttccgtgtggtgtatcttttacaaagtaaaggccgccgatgcactgatatggatatcttatgtgataacggctgttttcttttgcttgctgccgtttgccgaaacccttttcgcggtatgtatcgtccacgccgtgacaggactgacattgggatttatttttccgcttttggtcagcaaagtcgttcagcttggtacgcctcagctcaaaatgtctgtgatgggtttctatcaatctttttatgcgctcggtttttttctcggaccggttgtggcgggaaaagtggctgaactgttcgggctgccgaaggtgttttggtttgccggcgcattgtcactggccgctgcatgtatcatgcttttttccaaacagtttcgtatatttacagcaggaagacgggataaatcctcaaatatcgttcagccgacgaaggtcttccgtaagtgaaacagcgatgaatcccacaagaggttcatcgctgttttcttctttaatacgggtcttgagagtgccctttttcttccgcctgtctcggggcatcttcggcgccttctgctccgatcggctcccggctggatgtattttggctggaggcgttttttaatccttcctcgactctgcttccatattccttgtcgcattgcttcagcatatcgatcatcttcgtttgaattctttggtcgcacggggcaagtgtattgaccagattcgtaatcagctcgtccttttcccagtcttcgaaatgcctgtaagtgtccccggcctgcttgaaattattctgcctgtcgatactttcgcgcacaaggtttccttccacatgcggggtgtattctttgccatcctgctttgcttctttcagcccgttgatggttgaaggttcatagttgatgtgcgggctttgatttttgcctaaatcgaccttgtactgcatctggccgccccgctgattggttgccaccctttttttcggcgcattgatcggcagctgcagatagttggctcccactctgtagcgctgtgtatccgagtaggaaaaagtacgtccctgaagcattttgtcatcggaaaagtcaagtccgtcgacaagaacccctgttccaaatgccgcttgttcgacttctgtaaagtagtcttccggatttttgtttaaaaccattttgccgacaggcagccaaggaaattgatcttcaggccacagcttcgtgtcgtcaagcgggtcaaaatcgagctcaggatgctcatcatcgctcatgatttgaacgaacagctcccactcgggataatctccgcgctcaatcgcttcatataaatcctgtgtggcgtgattgaaattcttcgcctgaatttcttccgcctctttttgcgtcaagttttttatgccctgcttcggttcccagtgatatttcacaagcacggcttccccttcttgattcacccatttgtacgtgttcaccccggacccctgcatctgccggtagttcgccggaataccccaaggcgaaaacaaaaatgtgatcatatgcatcgcttcaggcgtgttggaaatgaagtcaaagattctttcgccatcctgcaaattcgtaaccgggtccggcttaaatgcatggattaaatccggaaactttaccgcatcgcggataaagaagatcttcaagttgtttccgaccagatcccagttaccgtcttcagtgtagaacttgaccgcaaatccgcggggatcccgcagcgtttccggtgaggatatcccgtgagtcaccgtcgaaaaacggacaaacaccggggttctcttgcctttttcctgaaaaagctttgctctcgtatactttgagaccggctcatcgcctgctgtcccataagcttcaaaatagccgtgcgctccggctcccctggcatggacgacccgctctggaaccctctccctgtcaaagtggctgatcttctccaggaaatcatagttctccaatgttgatggcccccggttgcccacggttctgatattctgattgtttgtgatcgggtggccctgccggtttgttaacgtatcatcagtctccatgtcagatttctgctcgtttgaatgctgatccattcttcttccccctttatttggaattaacaataatttatcccaatccagaaaagttattcagcatttatcatgatcaaatcaacgataataaatttttctttataataattataaataaatattgtttttttcttgagaaatgttatcattgttttgtaattaaaatttacgcgaggtgatcctttgatgacgacaaataaaaacaacctaacaaccagctggggcgctccagttggagacaaccaaaactcaatgacagctggttcacgcggaccgacgctgattcaggacgtccacttgctcgaaaagctcgcccacttcaatagagagcgtgtgcctgaacgggttgtgcatgcaaaaggcgccggtgcgcacggttattttgaagtcacaaatgacgtttccaaatatacaaaagccaaatttttatcagaagtcggaaaacgcacgccgttatttgtccgtttttcaactgttgccggcgaaaacggttcagccgattccgtccgcgacccgcgcggtttcgctgttaaattttatacagaggaagggaactatgatctcgttggaaacaatacacctgttttctttatccgcgatgcgattaaattccctgacttcattcatacacaaaagcgccatccggtcacacatttgaaaaacccggatgccgtatgggatttttggtcattgtctcctgaatccctgcaccaggtaaccatcctgatgtctgacaggggcatccctgcgacttaccggcacatgcacggcttcggctcccacacattcaaatgggtgaatgccgaaggagaaggcgtctggatcaaataccacttcaaaacagaacaaggcattaaaaacctgaccgaagaagtggggacaaagattgcaggtgaaaaccccgattatcacacacaggacttgtatgaggcgattgaaaaaggcgacttcccggcatggaagctgtacgttcaaataatgccgctggaggatgcggatacgtaccgttttgatccgttcgatgtgacaaaagtatggtcgcaaaaagattatccgctgattgaagtcggccgcatggttctaaaccggaatccggaaaactatttcgcagaggttgaacaagctacattctcccctggaacattggtgcccggcattgaaccgtctcccgacaaaatgcttcagggacgcctgttcgcatatgcggatgcacaccgctaccgcgtcggcgcaaaccataacagcctgccgatcaaccgtccgaaagcggaagttcataattatcaaagagacggacaaatgcgctttgattcaaacggcggcggctctgtctactatgagccgaacagcttcggaggccctcaggaaactccggaaaacaaaacaacggcttatccggtgtcaggttcggcggacagcacggcctacgaccataacgaccactatacacaggccggagatctttaccgcctcttgagcgaagaagagcggacccgccttgtcagcaatatcgtaggttcgatgaagcaggtgacaaaagacgaaattaagcttcgtcaaattcagcatttctataaagcagatccggagtacggcacacgagttgccgaaggattgggcttgtctgttccgcaggaagtttaaggctaatatcatttcaatcattctcaatgaaattctcattttctcaggtacaggcacccgtcctcttaagcatgcgggtgcctgcccttaatcaaagaacgacaggggatgttacgtgtggaagacgagcagctcgtccctttattaaaaaagcggggtttacgaattacagctcagcgcgtcctgattttaaaaacgattgcttctttgggcggccatccatcggcggaagacattcaccgggaattgccgtacatgagtctcccgacaatctacagcaacttgaaactatttgtgaagctcggcattttaaaagagctgtctcacggagacgcaaaaagcaaatatgaactgtttacatcacagcattatcatgtcatttgtaaatcatgcgggaagatcgctgatctggactatcctcacctcaaagaggtagagcatgcggcagcacaattgacgaactttaaagtgaactcgcattttctaggaatctatggaatctgtacaacatgccaagaacagcagcagaggtgaagacatatggaacgaaaaaaagtcggcctgttagtcatggcatacggaaccccttatcaggaagaagatatcattccgtattacacgcatatccgtcatggaaaacgaccgtccgatgatatgattgaagacttgaaaaaacgctacaagcatatcggcggaatctctccgctcgcgaaaattacgctcgctcaggcaaaagagctggaaaaaacgttgaacgagcgccaagataaagtcgaatacgtgatgtatctcggcttaaaacacatctctccgtttatcgaggatgcggttgaacaaatgaaaaaagaccaaattgaagaggccgtttccgtcgtcttagctccccactattccaccttcagcaccgaagtatacaatcggcgcgccaaacaggccgcagcagcaatcggcggaccacggatcgcatcgattgacgagtggtatcaggaagaaggctttattcgctattggtctgaagaaatcggcagcattttaaacgacatgtctgaaaaagagcgggaaaaagcggccgtcatattctcagcacacagcctgccggaaaaaatcagggagcatggcgatccttacccggatcagctcgagaaaacagcacaactaatcggagaacggctgtcatttgaccagatcgccgtaggctggcaaagcgagggcaacacgcccgatccttggctcggcccggacgtccaagacttaacaaaggaactgtatgaagaaggcttccggtcattcatttacgcaccagtcggttttgtatctgaccacctggaagttctgtatgacaacgactatgagtgcaaagtggttacggacgagcttggcgcaagctatcaccgtccgcctatgccgaacactgatccgcggttcatcgatacgcttgcttcagtcgtggagcgaacatacaacagcacagaacaggagaaagcggagctgtaaatcgagctccgctttttgctgcaatgttatgacgtgacaatatcccgcttttgaaaaacccaaaaggagacagccagaaaaagaataaaataaacagcaatcacagccgctgaaaatgaaagagtcatatcttgaataaacggctccccatcaatgtattgactgagatctgaatttgcaaagatcgtatacttggtccaatcaaattttgccgctaaaaattgagtaatcgcagaccctgtaaaaaagacgaacagcgaaagaccgacagagacgaccgcgcttcttaggatgaccgaaatcataaaggccagcgtggccagcacaataatattcaataaagcggctccatagtctaaggctaaaaacttcagcattgacatctttatcacttcgccgcttcgataggacaaatagtattggcttccctccaaacctagcagggcataccctaaaacaaacgcaaataaaagtgtcgcagcaaacataaatacagtgttgagcaagatcgacaagtatttccccaatagataatgccaacgcttgaccggtgttgcaatcgcaaatttaatagttcctttgctgtgctcaagcgcgatggagttcgctgccagcacgattgcaatcaacgcgattaatgttgtgatcggttttaactccttcagcatcgtccaaacattgtatttcgcagaaggcggcaaattatgctcaagccggtattgattgaccgcgatctcttcttttaaaaattggtatttgggaaccgctgggctcagctctctcatttctctttcatactgagcgttttgaacggttaattgctctttccagttacctgtctccttctccttttcgccattgctgaccatccatgcaacagcgattgtcatgacaagcagcaagcttaacacaatccaggtacttttcgtcaccatcagcctgtaaagttcatttttcaagaccctcatgccggtcaccccttattgatcaattccagaaagctttgttctatcgactgtttttcctgcttcatatgcagaactcttattttgttctccattaacagattaacgactttcataatgtcttcttccatgcaaaggacataaatctcatttttatcttccgtgagaccgcctgcatactggtactcattcaacaggtcagccgcttcatcggcgtggccgtttaatgtaagccgataacgaaccgtatcggtatcgcggtgattgctcttaatttgcaggagttctccgtttttcatgacgccgtattcatcacaaatcatctcaacctcagacagaagatgactcgaaatcaaaatcgttttgttgaaggttttcgccaagtactgaaggtgttcgcgcaaatcaatgattccctgaggatcaaggccgtttgtcggttcatcgagaatgagaaattccggatcatgcaagagcgcgacggcaaggcccaaacgctgtttcatgcctaatgaatacgttttaactggtttatgaatacttcctgtcaaatcaacaagctgaacgatctcttctatgcgctcctttgacacgtggctgtggaatccgccgagatatttaaggttttggtatcctgttaagtgctcataaaaggatgggttttcaacaacagaaccgactcgggctgccgcttcctcgtaattgcttttaactgaatagccgtcgatgcggatatctcctgatgtcggctttgccatcccgacaatcattttgataagtgttgtcttgccagcgccgtttggcccgagcagcccaaaaattgtacctggggcaatttgaaatgtgatattttggacaattggtctgccttttattcgtttacttacaccttcaaattcgacttgactcattttgtattcctcctttttggtatggcctgatctgtttcaatagaagagaaaaaaagagctgcgaaaccgccgtgaaccaaacaatcgaaccgataagaacggcaactgacttctccattgcaatgagggccgtcacaggaaaagaccatggaaagagaagccctaaaggggattgcgaaacgccgaaactcagcagtgaacaaatgaatacgataatgtttaatgaggtcttttccttactggtgaatttaagccataggaccgtacagatcagcggaaaggttgacaagagattgagaatgaagcccttcatccaagaaaaccaaggggcaggcccggggaaccccgatattaaaccgaaggcaagcgattcgatcacacagacggcatataatgcggctgcgaacagtccaataaacaaaaccttagcaaaaagcatggctgcgaaaggctgcggcgataagattcgattcagccacactcggtttttcagttcatccttatgcaaaaatactgtgaccgaagagacaagccagggataaatcgtgctgaataccaacagcaatgtaagatgccttaacgatgtccattcattccctcccgcaaacggggtgattcgttttgccataaaccctgtaaacactaaagatgcggtaagaatgaatatgctcgtcattgtaaaatcagagttcctgagtttgatccattccgctttgagcaaatttttcacggatcttttcctccccgctccttaagatccaacacatacagaccgctatataacccgccgaaataagataaactgccaggcctatatcgttcactgaatattcagtcaacaaaagccaagaaactccccacggcaaataaagtgttccactttgcataaaaaacggcgtcagcgtcatcaacagcacaaatagatattctgcctttaacgtcttcagaaaaaactggacggaagacatgatcaccgccagtatcgcaacagcggctaaacgctctggcgaaaacaaaacatccttttgaaacagcagactgactgccaaacagccgtaaagcaagaccagcgctgagacgatagttatcacggcgattccagtcagcacccaagtgaacaggcgaacgggataccgcaagataaaagcttgatgcatcatgcgtccaaataatcttctgcctgtaatataagtcagccaaaccgagacgacataaacagccattccctccatgctacggatttctttatttgccccgtttttataaaagagaagataattaagcaaaacggcgagcaccgtgatgatcataaccgtacatgcaaacgtctgaaatttcattctctttttcaccgcttcgggacagcttaaccaaaaataaactttaaacaatttcatttaaacgcccgctttctatggctagaaaacgatcaaacaattcgataaaagtttcgttccaatggcttgatgccatgatggtcccgtcataccgccttatgatgtctacaacgctttcctgcgcttttcggtcgagcccatttaaaggctcatccaatattaagatggaaggctgatgaaataaggccattgcgatcttcagcttttgcctcatgcctgttgaatagtactgtactttcgtgtcatcagccggattgataccgaaccgctctagttcagaatagatccggtcatcgtcatctattccgtgaagcaaggcatggactctcagattgtccgttccagtaaggtgctcatgaagcggcacttcgtcactgacatagccgatatgcccgacagcagcttccctgttttggataatcgattgaccgtaaatcaaaatttcgcccgcaaataaagacaagccggtaattgctttaagaaacgtcgattttcccgatccgttttctcctttgagcaaaacccggctccctttgtccacagcaaggctgacgttttcaagaagtttcctgtctcccgcccgcacctcaacatggttcatgacaattggaagctcaaccatggctacacccttgaacgaattcccaacaaaatgaagaatccaatgaaatacggcagcgaaaaagccagtgtgaccatgtttttataattggcgaacgacaaatcgacccatgaacttgtaaaaataacggcggatattccaagtgtaagcaaaaagaacatcacccgaaagaatttgttttgaatatatgccccgcgttcatcctttccgtcaaggctgattaaaataatgattccgataaaccccgcaaatcctgcgacagcaccaattgaattgatcatttctagcatcagcgatcatcctcctctagttggtattgaaatacctcgttgatgtccttctcaaataacgcggcaatgcgaaaccccattaacagggatggtttgtatttattcttttcaatggaaatcacagtttgtcttgttacacccaatagatcggcaagctgcttttgcgtccaccctttctctgctcgcagcacaggaatccggttggttaacaccccgctttgcttttcaatctcaatcaccctctttatttgcaaatcatttacatatatagagtacaatgttttttacacattgtaaagagtttataacaaaaagtaaaaagttttttaccaaaacagactaaaaaaagatcttcacgtgatgattgtgtgaagatcttttcgacaatcaagatttaggtttttcaaaaatcagttcgatagaagaaacctggcctccggcccttgatggaacagaaaagacgctgtgaagcttccagcctttttcagcatattcatgaatcacatcagaataatttttctcaagttttccgttgaatgctcctacagcgattgaaactgtttgatattcatacatacccttcactccttgttcatcattttcagcgcttgataagcgcgtacttccccgtagccgtatataacatctttccccggtttgcccaggtctaatgccgatttcctcaggatgtgatgcacttgtttagccgatggcttcctgtgatggcgctcccggtattcagatataaccagtgcagctgttccagctacctgcggggcggccaagcttgttccgtatgagagggaatatccctttgggatgtttagcatctggtctaatgcggtgttgtccttccctttcggatacgttgtcagtacgaggtctgtcacacgaaccatcccatcctgatcatacgtttctcccaaatatcctcccggggctgtgaattcaatttcccgcccttgattggagtatggggaaatattgttgcttttcatattgctgccgactgatacgacgtgcttcaaagcgctcggcaaatgcaccttgttttccgttttcctcatctcatcaaggttgactcctttattgccggcggaagagaagaccagcacctgatgctttgcagcgtagtttgcagccctttgataagctttcatcagcacttttccttccctgtcaagagaagtatagcttcccgtactgatgttgatgacttcatgcccgtcattgactgcatcaaccatcgccttcatgatgttgtagctgtctccgcctttttcgtccagcacttgataaggcgttatcgtcacatctggcgcaatgatattgatcatcccggctgtttgtgttccgtgtcctgtcggatctccggatacaggcttgccgtcaatgtaattccagccgccatttgtattgacggacgcttttaagtccggatggtcaagatccagtccgctgtcaatcaaggcaactttgacgtccggatgccctctttcgatttgatacgtgcgataggaatccgtctgctttgcagcgaaccatagatattcttttagttccaaaataccgtcaagcccccatgcaggcgaaccgctgatgactgattccgtttcgtttactgctgtatttgcaatcggcttttcaatgacgtcagccccgactttttcagcaagcttctttgtaaaaggagcaagcttttgtttttcaccggtcacttttgcaaatccgatttcttcaatgacatcggcatggatgtgaaattgttccgccgtgtccagcagtttcgatttatcttttacatgttcaagcaaaagatactgttctcctgcttgttcttttgcttgagccgtctttccgccgaccggcagcaggactgcaaaacataagagaaaaatatatattcttttcacatcatcacctctgcagattgctctttttcaaggaactttcgataaaaatctccgtaaaacttgctctcattcagcaatgtttcatgcgtacccacatttaaaaccatgccgtcttccaaaacgatgattttatcggcatccatgattgaagtcagtttatgcgcgatgacaattcttgtacatttcagctcccttaaaaaggcgtcgatttttttttcattttgatgatccagcgaactcgtcgcttcatccaacagcatcacagcggggcggtttagcagtgcacgggccaaggcaatccgctggcgctgccctcccgaaatattcatccccatttcagaaatcatcgtattaaagcccatcggcatattttgaatgtcatcgtatatttgcgccatttttgcgacttcatgtatccgctcaatgtcaacatcttcactgtataaagaaatgttgtctttaatgctgcggttgaacagcgttacatcttggggaacaacaccaatttgtttgcgaagagcgcttaaatccttgtttttaatattcacgccatcatagaacacactgccttttgtaggcatatagaggccaagaataagttttgccagcgtgctttttccggacccggattgtccgacgatagcgattttttcgccaggcttgatatgcaggcttacgtctttaataacttcttcgctgtgcgggctgtaacggaacgaaacccgttcaagccggatctcccccttaatcggggagttgtctttatttccaggtgtctcttcaatcgggctttgaaggatatcctgtatccgatgaagataagacgtcgtcaagattaccgagttgacggtttggacgatcgagctgcttgtattaaagaattgtgtggataaagcatgaaatgccaccagctccccaaccgataaattcccttcgaacacgagcattgcaccaatccataaaatcagcattggtgatatgatctgcatcgtgcctgtcagagagttcacgatgttaagaaacccttccttgcgtcggtatgccccgatcagttcccccagatagtgatcccatttttgatacgtttctttttcgattcccgcagtcttaataccaaaaatcccatataaaaactcagtctgatagctttgaatctgcgaagtctttgcgatttcgtcctggtttttttctctcagcttcccgcggctgagcgccgtgatcccgacattcagaagagccagcagaataaccagccctgctaaaggcggcgatttataaaacatataaaacgagataaataaaagtgcgccaaaatcgagtacgccgaggaccaattgggaagacatcatatccctgacaatccggaggcttgtcgcgcggaaaaggagatccccgaacgacctcaattgaaagaattgatagggaagcttcagaatatgcgagaaaaatgttctcatcattcgtttgtcaaggaagttatttaatttaatgataaattgacccctgatcaattgaaccgtgccttgaacgagcattaaaacaagaacgcccgtcataaatgtttgcagcagagcctgctgattttgagcaaggatgtcatcgatcaggtattgcacgagcatcggtatgcctaatgaaacgagctgaaagatcatcgcaaacaacagcacggtcgcaagcagagaaggggattcttttaaatgaaaaagaaaatgcctccagacgggcggttttttcttcggcctgatccgctcggtagggatcatctccagcacgatcccgctgtaattttcgagaaaagcttcgatactgagtttttttcgtccaatcgcaggatcgatgatgttgacatgccggtcttttatttgatcaataaccacataatgattatcggaccaaaaagcgattgccggcagacgcacatgtggaagttctgccgcgcctgccctgtacacctttgcgtcaaatcccagattttcgctgagctgacgcatatgaaaaagggtcataccgtccctgccgcatcccgataaatccctcagctcatgcagagtatgatgcgaaccataccgtccggctaccatcgccatacagcacagtccgcattccgtctgctgcatctgttctataaacggtgtcttatgaaaaaacaagccttatctcacctgcccgtcggaatatcgagagttaatacggatggaacagattcatcgaggagccgcaaaagcccgtaggctattcctgccgtcccgacaaacatgccaagcgattccacatcggaatgcaaacccgttttccatccccggtttttcgttttataaatgcaaaatatatcatcagggacatgaagttcccggttcagccttttgatatccagcagaatgttcaaattcccaattaaaccgtggcacagcgaatgattttgacagtctgctagatttaaagaactttgaagcgcttcttgaagctttaaagtccgggtagtcaattcaggaataaaagcctgaatgtgcgctctccccagcaaaatcccgggagctccatgacaccagtagcttggggacagcgtatgcgaatcatttcgtaaatctagccagtttagatgatccttttgaaaatagcggtcctcttcttcgacaagctttaggacaagctctttgcagctgtcatcgtgtatcaccttcgccgcctttgcgatagaaaatgcgatccccgtcaagccgtgtgaaaatcccgtcaacgaaacggcatcctgctcgattgaatcaagtaagcggccaattcgatcattcaatctgctcagtacctgtcttatagagtccaatactgctgggtgctgcttgatttcgtacagattaacaagcactgtcagcaatcctgaatcccctgcgataaaatccgggttttgtgtttgattcggctgatccaaaactcggggaatgaggttcaacgccctttccaataaggaatcgtcttcccatagactgccaagataggaatacaggtaaatgaatgagcctgtgccgaaaaaagcagaatgggaattcccattttgaacccaataactttcttccttttgaatttcttctatcattgatcttgccgtatccgtatatacctgctcgttcagtaccttgcctgcttgtgcaaaaaatattgccagccctgccattccgtcgtaaagccccataggaagcggcgacaaaaacaccattttttcgtctccggcattattgctgatccagaaaggaccttcaccgcgctctgaatagatcgccttctgcagcaaatcatcagctatatgcttgacctcttttccgagatcagcgaccgtttccttctgtccaagcccgctttctgcatggtcccagacattttcaatcaacgtcgccattgataaagaaatatagcggagctgatgattcaaatccttttccgagaaagattgaatttttttctttgccaaatcaatacttgatgtttcataaaaaccttccgattcttcccctcttgaattgagcagggaagtgcccccagcataaaaagtaaagtagggaatatcatgaagcagcagatcgacaatttcgtccggaataaacacgtttgccttttccgactgtttggcgagcatccacatataatcaaataattgctctcgtttatctccggcggtcaagtagtcagggtgggtgctcgcttcgagaaacttgccgtacacatgtgtcggccggaagacgtggcggacttcgtcgtgcttaaacagattcaaaaaccccgagggtcctgccagttcttctttatgtttcatcataatggcataagcatttttaaatccttccacgataaagtccgtatagaaaacggcggacaccggacgtccatttagtttgggcgcattcaatttttcctcggtggtcagcgatgtttcttttaaagacatcctgtcctcaccgtaattcaggacggcgtagcccttcgctttctttgactgctggccgcctttgccgccgatcccgcttaaatcaaaatcgagcacttcatcatgtttgaatttgaccggaagcatcatcgaagacagcacggaatgcttcagctccaatgcggtgacatggaggttttgattttgagcgaaaatgctgacatggttgtcaaaaagagtctccagatcaatcaggatggggtgttcgcctgaggcgatgatattttcattatgaaaatcgacggagcgcaatccgtacaatatcgccaaatgtccgccctgccggaaataaaatctttccagttcttcttctgaagaacagccttcatgctttacaaattcctgccagccgtaatttcccctgtcaagcacttccgcagcacggaggctgtacttcattccccgtccgttcagccagttcagcagctccctgtaatgttcgtcaattgacaaggaccgcggtttatacacgagctttccgttgtttaacaccagcactttgacactctgcccgtttttgtgggaatctcccaaatccccttcaaatccaaccaattcgggggaagcgatattaaattttttcgcaatcaggctgcggtcgcttaaaaatctcccaataatttcttcatgaatctcgagcaccctgagaaccttctcagccatcagcctgccaagcacagggtaaagctcgaaaaattcccggtaaatttcaggatcggaaatgtattgttcaacaaagtaaacatatcgctcttccggtgacgccccctttagccggccgtcttcccgggctacattcagctctgtgataagtgttctcgtcgccagcttatcaaggcattggtgaagttcagacatgatgccgtcttgatagccggcagcgtcgattatgccggatagaccgccttcctgcttctcaaattcagaaaaagctttcgacatccgttcttgtgcaaataaaagaaaaggaacaaagaaggtgacaaatgacatgtggggaagcgggtgttttaattcggaaaccgctttagggttgtatttcataatttcagacaaacaggcagcccattccggcattttgccttgcagctgcacaggctcattgggtgaatgttggacagaagaaaggtgaaaatccgtaggacgagacggagtttttccgttttccggaaaaaagccggacggatgttcttgaccttgaccgcctcgttcattgctgtaaagagctttatacagataaatttcgaattctttcatgctcattctcgtcatccctttggcgaagaaaaccatccctgcaactccgttgcaaggatggattcttttgaattttttatgattccctagcatcggcttgtacacttagttgttgggcataatgaagcagaaaccgttacaccggctgtgatgcaagtccaagaagaggttgtagcaggagttgtttcaggattgacgtcatttcctcctaccaaagctttcaattcctcttcggaaaccatccctgccggatgattggctcctttgaaggcttcacgggcagctgaatttttcattgttttcatgattctcacctcctagaacgggcaaactatcgaaattttcctataatttagaattgactcgccgttccagtcaaattatactataagtacatcaagaaatcgacaaaaaattataaattttctaggaggtggaatatatgtcaaaaaaggaaatgattctttcatggaaaaatcctatgtatcgcactgaatcttcttatcatccagcagggaacatccttaaagaactccaggaagaggaacagcacagcatcgccggaggcacaatcacgctcagcacttgtgccatcttgagcaagccgttaggaaataacggatacctgtgtacagtgacaaaagaatgcatgccaagctgtaactaagttcccaacgcgggggccctgctcccgcgttggcatattgatagaaaaagaggtcgatagaatgaatgaaaaatccgccggatatcacgaacggcttcccgtcgcccaaactcaatccccgctcgtaaacgataagataaagtattggcgttcccttttcggcgatgatgataaatggctcaataaagcagtttcattattaagccatgaccctttgtcctccatcgcacaatcctcggtatcccagtcagtcgggctgaaagacagccgtcgcggcccatggcagaagatgcaaaagcggatctttgaaacgcccttttcctacaaggattctgctctgcaagattcagaattgctgttcgactccctgctgacccgttttgcgtctgcagcacaagatgctttggaggaacaaaatatcatactttctcctcctctttgccggcaggtgctgacacatttaaaacagacgcttcttcaaattgcccatcaaacattaatactggaactaaacattttaaggcttgaagatcaattgaagggcgacacccccgaaatgcgctatcttgatttcaatgataactttttagtcaatccaggatacctgcggaccctgttcaacgagtatcccgtattgctgcgccttctgtgcacaaaaaccgattactgggttcaaaacttttctgaactgtggaagaggctgaggcaggaccgcgaacagctgcaggctgcatttcatattgccggcgatcctgtccatattgagcttggggtgggagactcgcacaataaaggaaagatggcagccatccttacatattccgatggaaaaaagattgtctataaaccgagaagccatgatgttgacgacgcatttcaacttcttctatcatggatcaatgaccgaaattcaggcagccctttaaaaactttgagattaatcaataaaaaacggtacggatggtccgagtttattcctcacgaaacgtgccatacgaaaaaagaactggaaggctactatacacgcctcggcaaacttttggccgttttatacagcatcgatgccgttgactttcaccacgaaaacattatcgcctccggcgagcatcctgttttaatcgatcttgaatcaatttttcatcaatataaaaaacgagacgaacccggctcgaccgccgttgacaaagcaaactacattctttccagatccgtacggtctaccggaatcctgccgttcaacctttacttcggaaggaaaaaccgggataaagttgtggacatcagcggaatgggggggcaggaagctcaggaatcaccgtttcaggcgcttcaaatcaaaggatttttccgcgatgacattcgcctggagcatgaccgatttgaaatcggcgaggcgaaaaatctgccgactttagatcaccagcatgtccctgtcgcagattatcttcattgtatcatcgaaggattttcagcagtataccgtctgatttctgatcatggcgaaagctacctggctacgattgaacattttaaaaactgcaccgttcgaaatattttgaagccgacagcgcactacgcctctcttttgaataaaagctaccaccctgattttctcagggatgcggtagaccgtgaagtgtttttatgccgggtggaaaagtttgaagatgcagacacagatattgcagcggcaaaaacagagctgaaagagctcattcggggagacatcccctattttctgtcgaagccttcagatacctatttgctcaatggcgaagaagaaccgattgccgcttattttgaaacgccgtccttcacaagagtaattaagaagatctcatcattttcagaccaggacttaaaggaacaagcgaatgtcatacgcatgtcgattctggctgcatataacgcgagacatgaaaaagacgcaatcgatatagaccaaaatcacccgagtcctagatcaggcgccttgcagccgctcgccatcgctgagaaagcggctgacgatttggctgaaaagcgaattgaaggcaatgatggaaaggacgtcacttggatcagtacagttattgaaggcgtcgaagaaatctcttggacgatctcccctgtcagtcttgatttatataatggcaatgcaggcatcggactttttatgagctatctgagccgcttcgcaaaacggccggagacttactcgcatataaccgagcagtgtgtatttgcgattcagcgagcgttgaatgaactgaaggaaaaagaagaattcctgaagtacgccgactctggggcattcacgggggtttccggctatctgtattttctgcagcatgcgggaacggttcagaaaaaaaacgaatggatcgaactcatacatgaagctctgccagtccttgaagctgtcatcgaacaagacgaaaactgcgatatcatcagcggttctgccggtgctctaatggttctgatgtcattgtatgaacaactggatgacccggtttttctaaagctcgccgaaaagtgcgccggccatttgcttcagcataaaacaaatattgaaaacggagcggcctggaaagatcctcatacacaaaactattacacaggatttgcccacggcacttccggcatcgccgcagctttatcccgattcaataaagtgtttgattcgcaatcactgaaaaaaatcatttcgcaatgcctggcatttgaaaagcagctgtacatcgcttccgaaaaaaattggggatcaaaaggaagagaacaactgtcagttgcatggtgccatggcgctgccggcatattgttgtcgagaagcatcctccgagaaaacggagtcaatgatcccgggctgcataccgacatcttgaacgctcttgaaacaactgttaagcatgggctcggcaataaccgctcattctgtcacggcgatttcggccaactcgaaatcctaagagggttcagggaagaattcagcgaactgaacaccattatacagaatacggaagatcggctgttgacatattttcaagaaaatccattcagtaaaggggtatcacgaggtgtggattcagccgggctcatgcttggtttaagcggagtcggctacggcatgctgcaatgccaatatggagaagaactgccggaactgcttcagctcagtccgcctcaagcgcttatcaaaaagaacagcaaagcttttaaaagagaaaacgtgttttaaaatcaaaatctatggattttcatccatagattttttttgcaacattacgatgaaagaccttcatccaaatgcgcttattctcagattcgtgtcatttggcataatcaccagcttatgagcaaatccaactcacaacatgattattcagacaattcagaaatatatgctatgctctctctgattccaataaaagggagggatgatcggtgcccaccattcagtatccgccgtaattgtaagcgcttcccattcagcgttggcatcaaaaaagaaacaataggaggaatataatgaagaaattaatcagcatcatctttatctttgtattaggggttgtcgggtcattgacagcggcggtttcggcagaagcagcttctgccttaaactcgggcaaagtaaatccgcttgccgacttcagcttaaaaggctttgccgcactaaacggcggaacaacgggcggagaaggcggtcagacggtaaccgtaacaacgggagatcagctgattgcggcattaaaaaataagaatgcaaatacgcctttaaaaatttatgtcaacggcaccattacaacatcaaatacatccgcatcaaagattgacgtcaaagacgtgtcaaacgtatcgattgtcggatcagggaccaaaggggaactcaaagggatcggcatcaaaatatggcgggccaacaacatcatcatccgcaacttgaaaattcacgaggtcgcctcaggcgataaagacgcgatcggcattgaaggcccttctaaaaacatttgggttgatcataatgagctttaccacagcctgaacgttgacaaagattactatgacggattatttgacgtcaaaagagatgcggaatatattacattctcttggaactatgtgcacgatggatggaaatcaatgctgatgggttcatcggacagcgataattacaacaggacgattacattccatcataactggtttgagaatctgaattcgcgtgtgccgtcattccgtttcggagaaggccatatttacaacaactatttcaataaaatcatcgacagcggaattaattcgaggatgggcgcgcgcatcagaattgagaacaacctctttgaaaacgccaaagatccgattgtctcttggtacagcagttcaccgggctattggcatgtatccaacaacaaatttgtaaactctaggggcagtatgccgactacctctactacaacctataatccgccatacagctactcactcgacaatgtcgacaatgtaaaatcaatcgtcaagcaaaatgccggagtcggcaaaatcaatccataagctttgaggtgaaacgtccggggcattccgggcgtttcacttatttccatcctcatacgctttccataccgttggcagcagatcggaaagttcatgcgcaagaagcgcatgagccgatctggtctttgtccatgcgtccgcacatgcgccgtgcaagtggacagcattcagcaccgcttctctcgaattctcatgacagcacagcatcccgagaagcatacctgttaacgtatcccccgttcctccctttgccagcgccccatttcccgttacattcctccagcactcgccgtcggggaaagcaacgatcgtttcattgcctttcaagacaagggtaataccttgttcctccgcataatctcgagcataaccggcccggtttgcttcaatttctcgaatggacaagcctgtcattttcgaaaattcgcccggatgcggcgttaataccaccggcgcttcccgttcatgatacgatcgttttgaaagagcacccgcatcaagcacaaccgggcagtctttcgctaatacgctttgaaccgcttgctcagtcatttgcgaaggcggcagcccaggcccgatcgcaatcgcccggtaaggttcggcaatctcgcctgacgccgccttttcggcgccgtcccgccaatacgtcgcctcaggaagaacggggaggatcagcggaatcgcactcccgcacgttccgatgacaagctttcctagaccgctccgcatcgccccgattcctgcaaggagagccgctcccggcatatcatcgcttcccgcgagcaaaaggccggttccataagttcctttatgactatcatttccccttttcggcaatgagcccttcacgcagtctttcgtccatatcggcaattgttctgcagacatcccggatcacacctttcaatatagtttaaacaaacgtttaattaaattgtaactgaatcatacccttcactgctctttaacatgcaaaatagcactgatgaacggatcagtttacgttcatataaaaaagacagcttcacaacttgaagctgtgcttggcgttttcgactaaaaaagccggctgacaggcgcatccagacgataaagtcttgaatagcgcggattgttttccaaaagctgctgatggctccctgccattgcaagcttccctttgtctaaaaacagaatccggtcggccgcttcggctcctgccaaatggtgtgtaatccatagaacggtctttccatcaagtacttgaaacatcgttgaaagaagctccttctctgttttaggatcaaggcctacggtcggttcgtccaacacgacgatgggtgcgtcctgcagcagaatccgcgccaaagcaatccgctggcgttctccacctgaaaaacggatgcccgtttcctgtacagatgtatgatatccatcgggaagagactgaatataatcgtgaagcttcacctggcgcgccgcccaatacacgtcctcatcgctcgcgtcagggttcccgagccggatattattcaaaaccgtcgtatcaaacaggtgcggctgctgattgaaaacggagactacgcgtgaaatttctccctgaagagactgcacagaaatatcgttcaatgtaatgtttcctttagaaggagcaagcgccccttgtatcaacgacaagatggtcgatttacccgcaccgctcgggcctagcaaagcggtcttttcaccctgctttaatataaatgaaacaccgtccaacaccggctggccttgctcataagaaaaagaaacgtcttcaaagcgaagcgtgacatcgtccaaacctacagcctccgcccgttcctgctgaacatcggccccgttcccccttttcggcggctgcagaccgtccattctttctaaagaatcctgatactcagggattgaagccgctgcgtccgaaagcggaaagaaagcttccgtcaaaggaaacacaacaaggacaaacgccgcaataaacacaggagccagagccccttccgcgctttggccgcccgcccatattagcatcagaagaacaagtcctgccgccaggcattgcatggcaaagtccctccaacgactgaagcgcacctgtttcttttcgatcgccagccattcatgttctgccgcttcatacgaatggacaaagtcgttttgccggccgctgaaaacccaatcgctcacccccatgaccgcgtctgtcagctgacggtacaagtggctccgtcctcttttcagcgcaacattttttgcccttgtcacaagcagggaaacaagcggaacaagaaatacgaaaaccgcggcatagaccgccattagtccagcaaaaggccatgaaaaaaagccgatagctgcgatgaatacgccatataaaagaagagccgacagcccgggaaataccgttctcaaatacatgtcctgcaaatgttcaacatcgtcggccaaaatgccgagcatatcccccgttcggaaacgttcacgccattttaaagcttgaggttcgagcatcctgtaaagcctgacgcgcatatcggataaaattttcaaaatgatatggtgccctgtcaaccgctcaacatagcgcgacaccgagcgcagaatcccgaaggtgcgaaccgctacgatcggaacatagatcatcaaaacattttccggacgcgtagccgctttggatattaaataaccggaggtaaacatgagagcagccgccgagcatgccgtcaacccgccaagcagcacgacaatgatcaaaagccttgtatttttcttgatgtagggcagaatccacccgtcttcattgttcatgatgcacctccaaacgactgcgccttcacgagctcgtaataaacgccccgcttttcaatcagttcttgatgtgtaccggtttcagccacctgcccatctttcagcacgataatttcatccatatcaagcatccagtgaaggcgatgggttgccaaaaaaaccagcttgtcttcaaacagttttaacatcgtttttttcaactcgtattctgtttcgatatccaaatgagcagtgggctcatctaaaagaataatcggacggttgccaaggaaagcccgggcaacggctgtacgctgcgcctgtccaccgcttaatgccctcccgccttcaccgatccgctctttcaagccgtttggaagctgatcaatcagctccgagagcccggcagctcttgctgcctgttcaacgtcttcgtcagaagcggcgggatgataaaaacggatattggctgcgagcgtatccggaaagatatagggatgctgcggaatatacaagagctgattttgccagctgtccgtctgcaaatgcgttctcttttttcccccgactttgataacgccgcttttcgtttccaggaagccgccgagcacatcgataagcgtagattttccggcaccgctttccccgatgattccgatttttctctttcccttaaatgaaagagaaatcccggataaagagcagttttcctcatcttcatgccgcacatctacatgcttgaactcgatttgatcgtcgtcagaccatcgctcaagacttaaaggcgcctcatccttgaaacccggcgaatccaatatcgccttgatcgctttaccggcttcgcgtccgttcaatgtagcatgatagtcattgccgacttcccggacagggagaaaaaactcaggggcaagaatcagaatggcaagagccggctccagcgagatgctgccgtcaacaagaccgagaccgagaaaaacagcaacggtcgctacggacagcatggtgaaaaaatcaagtgcaaacgatgacagaaaggcgatcttaagcgtactcatcgtcgccttcctgtaccgttcgctcacatgaaatatattcttagtatgtgaacggctgatgcccagcactttcaatgtttccaggccgcgcaaggaatctgtaaaatggtttgaaagcatctcatacgttttccattggctgtccgcttttcttttagccgcatacccaagaaggatcataaaagtgattaaaatcggcatcgtaatcattaagactgcagcggaagatgtgtctttaaaaaagacataacagacaaccgccggcggtataacggccatgctgaccattttcggcaaaaacagctccaaatagcggcggaactgtgcaattccttccatcgcgagcgtgacgacatgaccggttccttctttcctcgccagcctggggccggattggaaaagcttctccaaaaactttttccgcatgccggcccccgtctcggcggcatagtcaaatatcagcttttgcctgacaagggtaacagcatgtcgaaataaaaaagcggcggtaaataagatgagcagcggaaagagcgaaccgacgcgttctccgttaaaaaggcgggtaaccgcttcagcaagccattcggcctgcatgataatggcggcgccctgcatgcatgtcaggacagtgagtactgcaagtattcgtttcatccctttatattgcaaaagatcttttcccattaataaatcattggctccttgctgctgacccgttttctaaaaacatagtagctccagatctgatagcccagcacgaacggaagcagtgccagcgcgacgatcgtcataacctttaaagaatagtcgcctgatgaagcattataaacggttaagtcatatgcgcttttcaccgagctgatcatgacgcgcgggaacagcgcagtgaaaatcgtcgccactgtaagagcgatccctgcgcccgtcatggcaaatgtccagccgtcgcgtttttgtttcataaacacgatcgacagcacatagcaaacgacaatcagagccgcaagcggtatcgtcacatgccccctgcccgtgaacaagtccgtttcaaaaatggataatgcaacaaaggcaacaagcgccgccaaaacggcgaatacgacttttttggccagctgtcttgcccggtcgcgcaaatcggcttccgttctcaatgtaataaagatcaggccgtgcagcaggcagagaagcgtaacggcgactccccctgtcacggaatagacgttcacataatcggtaaaaccggcgtgcagattcatatcggcatcaatcggcatgccgcgcaggatgctcgcaaacaatacaccgaacaaaaacggcggcagaatgctgccgaaaaatacgacccaatcccatgtattcttccattttgcggtttcgacttttcctctaaattcaaacgcgaccccgcggccgatcaatgcaagaagaacaaagacaaacggaatgtaatatccgctgaacatcgtggcataccagttcggaaaagcggcgaaaatcgcgcctcccccggtcagcagccagacttcatttgcatcccagaaaggaccgatcgtattgatcatcaccctccgttcaagatcgttgcgcccgagaaaccgcgtcgccattccgacgccgaaatcaaagccctcaagaaagaaaaaaccgatgaacagcacagcgactaatataaaccaaaattcattaagagataccatggtaaacctcctgatcaaacgggtctgtcgatacggaatcatcatgatggtggtcatggtgtgcagccccttttttaatctcccgcacaaacaagtagacaagaacgagcgccagcacaagataaatcgctgtaaacgcgatgacagagaacagcagcattcccgctgatacgttcggcgacacggactgcgccgttgtcaaaataccgaacaccgtccacggctggcgtccgatttcagtcatgatccaccccgccgtatttgcaatgaatggaaaggcgatcaaagccaccattgtccgcaagaaccatttgcttgtttcgagtcttttgcggaagctgagataaagaccggtcaaagcggcaacgatcattaaaagtcctgatccggccatgattctgaaactccagaatgtcgttttcaccggcggaatataatttccttctccgtatttttcttcatattgcttttgcagtgtcttcattccgggcacatcgccgctgaattgtttataagccaaatagctgagcgcatacgggatgctgagctcggatttgttttcctgcttgtccgtgtcaatgttcgcaagcaccgtccatgcagccggatcgccgctgtcatcccaaagcgcttcgctggcagccattttcatcggctggctcttcatcagatgctgtgcctgctcatgtccgctgaacgcaacgccgcccccggaaacaagcgccacaatcatcgcgatttgaaaggattttttaaaaaagagcaattcctgttttttcagcattttatacgcgctgacaccggcaatgaaaaacgccccagtggcaagcgcaccgaaaatgacgtgcggaaattcaacccatagctgcgggtttttaataatcgcaaaaaaatcggtcatttccgcgcgtccgtttttgatcgcaaatccgacaggctcctgcataaacgagttggccgctagaatccaaaacgccgacatgatcgtgccaagcgaaacaagccaaatggacagcaaatgaatcttcttcggaaggcggtcccagccgaagatccacaaaccgataaacgtcgattccataaagaaagcgagcagcgcttccaccgcgagcggagcgccgaatacatcaccgacaaagcgggagtactccgaccagttcattccgaactgaaattcttgtaaaatcccggtgacaacaccgactgcaaaattaattaaaaataagtgcccccaaaatttagccatcgttctgtaaatgtcttttttctttgcgacataaagggtttccattaaagcaaccataaagacaagcccgattgacatcggtacaaaaataaagtgaaagatcgttgttgaagcaaattgaaatcttgccaaaatgagttcgtccactgttcctgtctcctcctctttgttctagccgggcccgtttgccaaatgggcatcacacttgctcagactttcacatgcatcttattaatgtgattatgattacagacaaaagggtgacctcggcccgcattgatgttccgttattatcatgatggttatttatacctgtactttaccgcgaattccttcttaaataaagtacattttccctaatttatggatgtcattgtgacaattatacgaaggaattatagatattttgtgacacgctggttaacaagcactaaaacaacatgagaaaaatgccccgaaattcacgtggaacatttcgtcattcaacatctgtgattcttcgcgaaagcctgtcgcatcaaaagaaaaccgttatatgcagtgaaacaaattcggggttttccttcagtgtgagcgcgccttacggaaagttctgctgttttgtccaatctgtgaaatcttccttccgccttctgcgcattcccttcatccatttgctgatttatctccactgaagccttcacgcagcacgagctgactgcaccgcacgtttttccccctgcacagccatccagctcccgctgactattaacggaggaagggaaggaatatttattgctttgaaataaacaataacgataccccgtttattctatgaaaatcgaaccatacatttgttcaaacaaaatacacaaaatttgtgaaatgtttcacaatatcctgctatacttaggttgtatttatgatagatacttcttaagtaaacacttgatggtggtggaaaacatggaatctaaatcacttgttctagtcgaagagcttgctttaaaaaagcaaagcatctttgtgcaaagcccgcttcgctatcttttacgggctatgctggccagtatgtttatcgggttcggagtcattgtagcgtttaaaacggggaatctcttttatgttgaacattctccgttcacatatccaattgcagcaatcacctttgggggcgccattattctgatcgtctatggcggaggagatttatttacgggaaatacattttattatacattggctgcgcttcgtaaaaaaatgcgctggcccactgtgatcaagctgtggatgttcagctatgcaggaaatttaatgggcgccgtttttttcgcaggcctcatctttgcgaccggcttatttaaagatccttcttccaccggctttattctcagcgtggcggagcataaaatgaatacgccggtgaccgaattgttctttaaagcgattctgtgtaactggcttgtctgccttgcgtttttcgttccgatggcgcaaaaaggggacggagcgaaaatgttctctatgatgctgtttgtctttactttctttatttccggttatgaacacagcatcgcgaacatggccacttttgccgtctctctggtcaccgagcatccggagaccatttcgattgcaggcgcaatccataacctaattccggtaacactcgggaacctggtcggaggcgcgtttatgatgggcttcatgtaccactatgccaacaagccgggcggtgaagaaatcatcaaataaaaagatcgtccatttttaatggattctaaatatgcgggctcccttcataaaatcgtggtaactttaaaaatggaggttcagcgatgcaaagttttcattcgctttgccggcaatttggacatattttaaatggggagccgcacattgaaccacggtgtctgttctgtcagcatcaaacggaatttgcgtgtcgcgattcaaggaagaccgagccggggagtcggcatggaagaaatcatgttcgaatcgctcgatcaaaacggaatcgccttgaatatggccgaagtcgcaattttgcctgaagaagttccgctgtttacaaaaaagcttgtcgatcagggcatcattatcagtgctctccacaatcattggatttttacagaaccgaatattttatatattcattttcaatctgtagaaccgccgttaacattcgcgaaaaaaacagctgccgctttatccgtattgcgatgaagcagcagctgttttctttatccgttgatttttcccatttctgaaagtgcgaccctttcgactgctttggccacaatctcgtgaacttcagggttcagcggatgaggcacaagatcgccttgtcttgtgcaggatgcgatcgcttcagcggccgcaaccagcatcgggtggctgatcgaatcggctccggcatttaacacgcccctgaaaatacctgggaaccccagcacattgttgacagaccgtccgtctgcagcgtaggctgccccggcctcgagcgcatcctcaggctcaatctccggcttcggattggacagagccaaaatcacctggccttcccgaacccatttcttattgatcaatcccggaacaccggttgtcgcaacgacgatatcgcagctttccatcaattcttcgatgctttcagccgcatggccgccatagttctctaaacgcgccatcgcctcaagcgatttatccgttccgacaacacgttttactccatatgccataaacatcctgcagatcgcgacacccgccgcgcccaggccgatttggccgacatgggcctgcttcagatccacccctgcactcttggctgctgaaatggcggccgccagcgtcacaaccgccgtaccgtgctggtcgtcatgcatgaccggaatattcaggtcgtttttcaggcgctcttcaatttcaaaacaatgcggtgaaccgatgtcttcaagcaaaatgccgctaaagccgggcgcgatgtttttaaccgtccttacgatttcatcaggatcattcgtgtcgagcagaatcggaaccccgctgatatccgcaagctggtcgaaaagagcggctttcccttccataacaggcattccagcaactggccctatgtctcccaagccaaggatggccgtgccgtccgttacaattgcaaccgaattgccgattccggtataaatattcgctttttgcggctcttctttaatgagctcgcacacgttcgcgacacccggcgtatacacccgacgcagatcagcaagcgagcgaatcggcatcttgcttttcatgcggattttgccgccttcatgtgcagccagcacgtcatctgaaacggtatgaagatggatgccttcttttaagttgcggatcacttcaagaatctcggtgagctgttcttcatgctcaacttgaaccgtaatgttccgcatcgtataattcggccctaccttgatcgtttcaatctctccgatatcaccgccggcaaggccgatcgccgttgtcacctttccaaggtttccgggtgctgaagggatttccagcatcaaattccgaataatattgttgccattcataacagaatacctccatcaattgttttaaaatcggctactgaaccggcgagtcttttttatcggtgtaccaaataaatttacctgtgtatccgtacaaaatcgcaaggccgattgaaacaaagctcagccacatgaacggcacataagagaaggtcgagacgccgagaatccccgccatatatatgccgttgtccgaccacggcaccatgcccgacgtcatcgtaccgccgacttccgcgtttctggacagcaccctccggtcaattccgagcttgtcatagcttttttccataattttcggtgttaaaatgagcgagacatacatcgcgcagccgaacacatttgccaagaaggcgacgataatcgtcgagaatgtgacgttgccggcagaagtcagcttttgctggaacttggagacgatcacttttagaacgcctaagtgctccaagaggccgccaaagcccagaccgagaatgatgacgacgaccgaaccgagcatgccctctattcctccgcgatttaagagctcgtccataaatttgatcccggtgtcaatggaaaagccgttgtatgctgtgccgatcgcatccgcaaagtccatgccttggaagaccgcagcccagatcgcgcccaaaagtgcgccgatcgcgatcgtcggcacagatggctttctcatcgccaatagaacgatgacgacaacagccggaacaagcatccaaatgtgaatatcaaacgtgttctgcaaagaagctttcaaaaattcaactttttccaaatcaacatttcggcttccatacataaagccggtgatggtgaacaggaccgccgtgattaaataggcgggaatcgacaagtacagcatcgctctgacatgggtaatcacttcgacctttgaaagggatgacgcaagcaccgtactatcggaaagcggcgataatttatctccaaagtaggctccggacagcacggctccggctacaagcggaagcggaagccccagcccttccccgattgccatcatggcgatcccggccgttcctacagtcccccaagacgtacctgtggcaacagatgtgatcgaacaaataatgagcgtggcaagcaggaatatgctcgggtggataaactcaagcccgtaataaatcaaagtcggcacaacaccgccggctatccatgtgccgataagagcgccgacggcaatcaggatcaatatcgcttcaagtccatttgaaattccgtttgtaatcgatttttgcaaatcttcataccggtgccccaggcgcagtccgagcaaaatcaccaagaaccatgaaataaacaatgccagctgaatcggcagctcgaatttgactgtaaatgaacaaactatcgctaaaaatgcacctaatacacaaatgatttccaacattgatggcaaccgtgctgttttcaacctaaatcccccttaattattgaaacgctttcaaaataaactacataaaaatagcaatctgcttcaattttttcttaaaaatttaactaacaacgaacagtataccatgaaaaaggctgatgcggtaccacttcaccgctgttgtcctttctcttcataaagttattgaaggaaagcgaaaacactctgtgtttctatcccggtaaaatgtcagagtgttttcgcatactgttttttccagatcaatcccgatttaaaagttcagccccggcaatccccggttttgtcatttcataaggattcaaaatcagatcaagctcttcttctgtcaacacatcgttttgaagacagagatcgcggacggattggcctgttaaaatggcttctctcgcaatccttgcagctgcttcgtagccaagatgcggattgaccgcagtgatgacgccggcgctcttttcgacatatgcttttaagcgtttttcattcgcttcaatacctgctacacagtgatcagtgaacgaacggaatccgttgttcatgatgctgatggattgcaggagattaaagacgagcactggctccatcacattcagttcgagctgtccggcttcagaagcaaggcagatcgtatgatcgtttccgatgacctggaaggcgatttggttgatcagctcggccataaccggattgactttccccggcataatggatgaacccggctgtcttgccggaagggaaatctccgcaagtcctgcgcgcggacctgatgccatcaaccgaaggtcgttggcgattttcgacatgttcatcatgcatacttttaatgcagctgaaacttctgtgtaagcgtccgtattttgcgtcgcatctaccagatggtcagcgccgacaagcggaagaccgctgatctcagccaagtgcttgacgacattttcgatatagcgcggatccgcgtttaatcccgttccaaccgcggtagcgcccatattgacttcatacaaatgctggcgcgattgtttaatccgtttgatgtcgcgttcgatcacgcggctgtaggcttcaaactcctgtccaaggcggatcggcacggcgtcttgaagatgggtgcgccccattttaatgacgtggtcaaagtcgcgtgcttttttcttaaaggcatcaagcatgtattccattgtgtccagcagcttttccagcagcttaagcgttgaaatatgaatcgccgtcgggaatacgtcgtttgtcgattgagacatgttgacgtgcgtattcggactcaggtgaatatattcgcctttgttgtggccgagcagttcaagtgcgcggtttccgatgacttcgttcgcgttcatattcattgaagtgcctgcgccgccttggatcggatcaacgatgaactgatcgtgcagctttccttcaaggatctcatcagcggcttggacgatggcatctccaaggcctttataaagacgttttgtctccatgttggcaagcgccgccgcttttttcaccactgccagcgccttgatcatttcttcgtggattttatatcctgtaatcgggaagttctccgctgcccgcaatgtctgaatcccgtagtagacatcggccggaatcttcttctctccgagaaaatccttttccgtccggtatgtcatttcagctttcattttttaaccctgctttctttttatatgatgatatcgtctgcaatcggcgtttccatgatctttttgacttcagcttgttgtccgtttttccctaaagcccacatcagcttcggaacgatcgcttcagtgttcatatttctcgagcggataatggcatcctggtttaccttgcggccgacctcgtaaatgctcatatcctctccttcttcaaggcattgcgtcgtgatcgctacgaccataccggaatcgatcagctcgttcactttttctaaaatgtttcttttctcaaaaggaatgccgccgcttccgtagctctcaatcacaatgcctttatatgaacctttcagacaatcgaaaaactctggttttaaacccggatgaagcttcaccagacaaacgtcggtatttaaagaggtatcgagtttcaaagcgcctggctttacttcgggaacccgtttgttgtactcgatttccttatcgtgaatgaaagcgatgtaaggataattgatgctttcaaatgcatcgtagctttttgttcttaatttgatcgctctcgtgcctaaaatgacgcggccgtcaaagacgacatatactccgccgatgccgtcgcacgcaaagcggaccgcatcttttatattttttttcgcatccgttttcttaaacgtaatcggaacttgggaacccgtaatcgcgacgggcttatcaatattctgcagcatgtatgaaagcgccgctgaggtgtaggccatcgtatcggttccgtgcgtgatcacaaagccgtcgtagcggctgtaattttcatatacagcctcagccatcatcacccagtgttcaggctgcatgttggtgctgtctatatccattaaagattggcaatctatcgtataatttgaatgatcatcagataaatagctgagaagctcttccgctttaacccccggagccagtccgttttcgccttctactgaagcgatggtcccgccggtggtcaacagcagtaactttttcatgtgctacacctctttaagaagtagttttatacagtataaatcatgatttattttagcaaagaagacttgatacatcaggaatgtatacgctttatgcgtaccttcaatgcaattatagtcctcaaatgtgaaataatcaagaaactttattcatttcgcgtacacttttactgataatgtgctataatcactgtgtatcaaaaggagcgtaagatatgaatttagatcgattaacaacactgagaaaaaacaaaaaatggtcattgcaatatactgccgaccgcctcggtattgcgaaaagcacttacgcgggctatgaatcgggataccgccgcccttctttagaggcgcttatcgaaatcgctgatttattcaatacctccaccgattttttgctcggaagagttgacgatccccgggatgaaaaggctaaaaacgaagccattgaactgacggattgggctaagctcaagctggcagtcgacggaacgcttctttccgaagaagaaatcaagcagatggttgcgtttatcaaggtcaaaaaagggctggatgcggagtaaaatgacagcggttaaccgccgcatgctataaaaagaaaaaacttgactggctaaaaaggccaatcaagttttttttgcttttattgatgtaaaaatttcacacaaaccgcttcaggagcaggaactccagactctaaaagcgtcagccggcccgttgtccggtctctttcaaacaatgtcaaagtccctgtttcctggttggaagcaactaagaattgctctgaaggatcaatctcaaagtcgcgcggccattccccttcagttgatacgtgttcaaccagggaaagttcgcccgaatactcgttgacgctgaagacggcgatgctgtcgtggccgcggtttgaagcgtatacaaatttgccgtctttcgtgatgtggatggcgccgccttggctatggccgtcaaagccttccggcaatgccgaaatcacttgaatctctctgaattcacccaaatcggggttgtattccagcacgatgacttcattactcagctctgttaatacatacgcatacttttcctgtggatggaactcgatatgtctcggccctgagcccggtgcagcagcgtgttttttcacttcttcaagccggccctctttcaattgatacgtgatgatatgatccgttccgagatcgacggccactgcatatttctcatcaggtgagaatcctgaataatgagtatgcgctttttcctgcctctcatgcggtcctgatccctcatgctgtacttttgatgaaggctcaagcaggccgcggctttcatttaaaggatatgccaagatcgtcccgttgtggtaattggcggacagaacataacggttatcttgatccacactgacgtggcaaggcgacggtccttccccggtctgctggttgacgatagtcagctctcctgtggaaccgtcaatacgatatgcggcaaccccgcccttatcgccgtctttgaccactgcataaagcatgtcattgtctttggcgatattcaaatatgtcggactgcccagctttgctgccggcttcggcgtgcttaacgcctttttttccgtatcaagctcaaatgtataaatccctacgctgtctgcttttgtatatgttccgatataacctctgtatttcgccatttgatcctctccttttttgacagtcgtccattcctattttaactcagagaaactgaattatcatgatctggtatgcaaaaaccttaagcgctcacatgaaaaaaaactttttatgatattcttaacattagaggcccttcactgccgcttttataaagaaatcggcagcggagacttgttcataggagtgttcaaaatgacgaaaatcatgattgtcgaggacagcgaagacattcggaagcttttacgcgatcatttagaaaaatacggatacgaaactgttgcagcgactgatttcacctctatccttgaaatatttctccaagagaagcccgacctggcattgcttgacatcaatctgccggcatacgacggttactactggtgcaggcaaatccgccagcattcgacttgtccgatcattttcatttcggcgagaagcggagaaatggatcaggtcatggcgatcgaaaacggcggcgatgattatatagagaagcctttttcctatgaggtggtctcgctaaaattaaaggccaaattcgcagggcatttggagaatacgcagtaaaacaaggtgaaaaagtgattgaatttgaaggcgtccagctgtttgtcgaacgttttgagctgcactgccgaaatgagaagctcgagctttcaaaaaaggaaagcaagctcttggaagtgctgcttgaaagaggagaaaaggtgacaagcagagaccggttaatggagaagacatgggaaaccgatacatttgtagatgaaaacacgctaaatgtctatattacaaggattcgcaaaaaactgcgaagcatggacgtgcccttctcaattgaatctgtgcggggcgaagggtatcagctgaggacgaaatcatgaagctgttcctaaaaaaccatgccgttctcatttttctgtttctctttcagggcggattcgtatttttttactattggtttgccggcatgcagactttcacccaccttttttacattctcggcgttcagcttctggcgcttgcgctttatctttcatacaaatggtatgaagaacacagagtctaccaatggatcggctcagatcaaaaagatacagaaattccttttttggggacgtctgaattttgctcagagctctatgaaaaacatatggagctgagccggctccaccaccgcaaaatacatgatatggagtccaagctggaagatagggtaacctacatgaatcaatgggtgcatcaggtgaaaacaccgctttccgtcatcaatctgatcatccaggaagaggacgaacccgtttttaaacaaatcaaaaaagaagtccagcagattgaatacggactggagacgctcctctattcatcaaggcttgacctgtttgaaagagattttaaaattgaggccgtgtcactagacgagctgcttaattcgctgattcagcgctataaacgctattttatacagcatcgtgtctatccaaataaacaggttcccgctgaagacgccgttatttactccgatcgcaaatggctcagattttccactggccaagtcatcactaacgctgtgaagtactcgtcaggaagaagcgaacgcatcgatttgacgatattccgtaaaggcgaacgcatcattctggaaatcaaagattacggaatcggaatcccttcacaagatgtgaaacgcgtatttgagccttattacaccggggaaaacggacggcgctttcaggaatcaacaggcatcggcctctaccttgtaaaagagattgccgaaaagctcaatcatgatgtgagcatcgattcagaagaaggaaaagaaacgactgtgcaattttcatttcttacaaaaatgtaagtcttctttaataaaaccgcatagctcatccccatcctccttgatatgatttgtttacaaaacaaacgtggcaaggaggattttttataagcaatccgagtctatgaaaagagtcggcacattctgttatataaacgaggccgccgttcttagtttctggacaatggccattcaagcctttcataaacgcattttggctgaaagcattccggaggagcccgctggaatggataacataccggaaacggtcatccttaaaaagcgcagcaaaaggaggatatcatgacaacaaatatgctggtcgttaaaaacatcaataaaacatataaaggacaagtctcccatcaggctttaaaagatatttcattcaatgtcgaggaaagtgagttcacggcgatcatggggccgtccggttctggaaaaacgacgcttctcaatatcatttcgacgattgaccgcccggattccggcgacattttaattcgcggagaagacccgcatcatttaaaaagggcgaagcttgcccactttcgccgcaggcagctcgggttcgtattccaggattttaatttgctggatacactgacgatcggcgaaaacatcatgctgccgttaacgcttgaaaatcaaccgctttccgtcatggaagataaacttcaggcgattgctgaaaaactcggcattgaacaacttttgaacaaacggacgtttgaagtatccggcggacaaaagcagcgggcggccatcgcaagagccgtcattcatcagcccgccctcatcctcgccgacgaaccgacaggaaacctcgattcgcaggcatcaaaagacgtgatggagacgatgcagcatcttaatgaaaacgacaatgccacgatattaatggtcacgcacgacccagttgccgcaagctattgccgtcgcgtcatttttattaaagacggaacattattcaatgaaatttaccgcggcgccaaccgccaagtattttatgaagagattctgaatgtgctgtctatgctgggaggaaataccaatgacctttcttcagttcgcttataaaaacgtcgtccggaataaaagagcctatctcgccttctttttaagcagctcattttcagtgatgatttttttcacatttgcgatgtttttgttccaccccgctttagaggaaggctacttaaacaccattgcaaaacgggggttgtcggtggctgaatggatgattttcgccttttccattctgtttgtgctttattccgtcaacgcctttctcaagtcgagaagcaaggaattcgggatcctcaccatccagggaatcgctccgggtcaattgaggaagctgattaccgcagaaaacatcatcatcggcgtgctttcgatcgttacaggcatcatcggcggtcttgtttttgcaaaaacattctttacgatcggcgcttatattctggaaatggacgctttgccattgtatctgccttggaaagcgatggcccttacatccgcctgctttcttgcgctgtttattctgctgtcgcaatttacggtgttatttattaaatcaaaaaccgttgtcaagctgatcaaaggcaccgggaaaattaaaccggagccaaaaccgtccattattttttcggtcgtcggcatcggctgcctcggctccggctactggcttgtattgttcgccgacatccattttccccaagccgtcacgatcttaattttgacgatcatcgggacttatttcttcttcagccaaagcagcatttggctgctgcggctgttaaaaaagcggaggtcattttatttacgaggaaaaaacgtgctttggatatccgatcttgtttatcggctgaaggataatgcccgcctgttctttctcgtttgcatcatttccgcggtcgcctttaccgccatgggtgcattggtaatttccaagacttctatcggaaaattggattcccgatatgagatagagtacttattatacagcgggagccaaaaggaacaaacacacgttaaggtgatcgaacaaaaattgaaggacggacatttttcgtatgcaaaggaagtgacaaaaggaatttatatgagctatagccagggagatctccttcctccggtgctcctggtctctgaaggcgaattccaaaagcacttcaagttaaattccggtgaactgaaagacggtgaggcgctgtattatccaaacgcctttgaggcaaaagaaaagcgggaaattcctgagaccttggacatgttgaacaaagatttgaagccggcaaatgaacggctaaaggtaaaaggtattaaaaaaccgctcatttcgttagaaagcatcgttgtcgtaaacggcaaaaccttcgaaaagctgaaaaaacaaggcgaatccctcacattgtacggctatcagtacaaccgctggaaagagagcctcgacatgagccaatcattggaaaaagatctcagagaaaaatctcacaatatccaatttcaatttgaagcaaaggccatcaattattttgaaactgttcagcttccaagcctgagtctgtttatcggattctttttgaagcaaaggccatcaattattttgaaactgttcagcttccaagcctgagtctgtttatcggattctttattgcggttctcttttttacggcatccgggagctttctgtacttccgcctgtttaccgatcttgaagaagatcaagagcgctaccggtcactctcaaaaatcggcctgagcgaaaaggaaatgtcgcagagcgtaacgattcaattggccatcctgttcttctttccgttcgtactcgcctcaattcatacgtattttgcgatgaagacgctcgaggcacagagccttggtcatttcgcatctccggtgatcatgacaataggcggatttctgatcttccaactattattctttatgatgattcgaaaaagctatctgaaaaaattaaaaggatttttaaggtgataaaatatgaaaaaaacaatttctctcattacagccgctttagctgtatgtatcggcgcatttctgttgattcataatgaagtgacagacaggttcaatccacttgtgaagaaagaaagcgtatatgtccagatcaacaaagacggtaagcacctgagcccgggccgctatgagtacacgctggaaggatataatgacaccggtaaggaaaaagaaattacattctccgccagcgattcccttcgaagaaacgcctatctaaaggtaaacgcgaagggaaaatatgttgagacatgggaagaagtacagcccggcggcatgccgagtgccgttcagaaaaaattgatcaagcaataaaaaacggcgtctaagccgttttttctatgaatcactatattttaacaaaattccgaaactttttggcccgttgctcgtataaaaacagaagtcatattgtttaggaggttttcatatgattgttggaataattggttttatactggtggttttccttctctacgcctccatgttgccgtccggggaaaaaaacagcggcagcagctcttcgactttttttattggaggtcctgactcatccggagacagcgggggtgattgcggcggcggcggcgatggcggctgttaagacctgcggctgcgttaacctaacttctgctcctgctcggatccctaggctgtatgcagttcttgctgcagtgagccgggtatattccagctatctcccttcatcattcattcaacatcaactccaaatacgtcattattcattcagttgtttaacctgacttccgattgggaatgatgtaaagacagcagattcccgctcttcaaacgatttaaaagtcacaataaagcgattctgatacaaaacatataaaactttgcacctacttgttcgatattaaaagaagacattcatgataaggagggttttttccagatgatttttttactggttttattggctctgtttattttgtattcattcttttttgacaagaacaacaaaagttcttataaaaaagcggcaccgaaaagcagaatattgatccgccaggcagctgcgccgaccggagttttgagggtaatcgaaaccgctcccggacagacggcaaaccgccgaacctccgaaggtatgcgcccgaatctgcggcttgtcatgagcccgacgcaccaaaacgaaaaaaaataaggaaagcggcatcatgataaatgccgtctttcctattgtctgctgtgttccaccattttcccaaaggcgtccggcgacatccccggcgagattcggacgcggtggagcgcatacatcccctgatccctagatgccgctcccggttctgttgtgacggccatttgatagcctgcctgctttgcgagtttcagcgtatcttcgttgtagcgcccgaccggatagctcagcatcaccgtattttggctgaacatgcgatcaaacagcgctttggaacgcgtcatttcatcgagctgctgtcccggtgccagtccgttcaattcaacgtgatgaatggtatggctttgaatcgaaatgccgtttcgcctcatttcattcatttgtttctccgtcaaatggttcttcccgccaaccgatttgccgatcataaaaattgtcgccttcatcccatagcctttcaaaatcgggtacgctttttcaaagttatctgtataaccgtcatcaaacgtaatcagcacgcatttatcactcggcattttatcttgcgttaagacaatataggcttcctcaggtgtcaacgtgtaatagccgttatccttcagccacttcatatgcccgcggaattccccttccggtacgcgcaggctgtttcctgaggaaatgctgtgatacatgagaatcggaatgcgggccgggcttttcactttgacccacttggatgatggatcatgttccgcctgctgttttgattgttttgccgctttttgagccgtatttggttctgttttttcctctccttttgtttcatgaccggaacacccgtacagcacccccatcaacatagacagcacaagtaacattttcgtttttttcacaattattcccgctttctatctactgaatcctttttaatatcggtgcggaacgggcatttttcactgttcctgctttgaggaggagagccaagctttacgcagtctgctgatcccttcttcaatttccgctgcagtaagacccccaaatcccgccatgacgattgaagagctgctttcatgaggcttaatccagaaatcggataccggataaactttcacaccgagtttttccgctttatgtatgaggtcttgtgcatgtcggtctgtcttcatcaaaatatggagccccgctttttcgccgatgattccacgtcatttccgaaatgcgttttaatggccgatattaatgttttgtgcttttcttgatatacttttttcattttacggatgtgcctttcgaaaaacccttctttcctaaataaaaacatcgctttttgaatgatgggtgaagcagactggctgtagcggccaagcttctcttgaaattcatccgccagttttgaaggcagaacgatataactcaatctcgctcccggaagaaatgactttgaaaaagtccctaaataaatgacattttcttttttatcaagcgcttttaaagatggaataggcctgccctgatagcggaattcgctgtcatagtcgtcttcgataatataggccttctcacggcttgcccattcaagcaatttcagcctcttctgtatcggcagaaccattccatacggaaactgatgcgatggcgtaatataaacgagtttcgcccgtgttgcagcaagctgtgtcaaattgatcccatccgtctccagaccaattggctgaatatcacatccatggttaaggaaaacagaacgcacaccatcatatcccggattttccaacgcaaccaatcggccgttcattgagagcagctggcaaagaagtccgactgcatactgcgtaccggaacagatcacaatttgctcaggtgcacagcggacacctctttgttcagccccgagagatcacagctaaagaaaacatgctgaaccaaagcatgaaattcgaatacgggcggaccgtacaggaagaccattgacaaaaaaagacccgcagcttatgctaccgggtctcccattgattttgatgcatgttcatctaaaaatttcaatcccgctgtgtatcgctttctccgcttctttatccagcagacgagcgccagccgctgatccgggtccttctcattgatagaaaccagcacatgttcattgatttcaagcgggaagccggattcaatctgacagcctgacaagctgatatccttaatcataacctcgtgagcccctttctctgaatcacggggaaacagcagtgttcccagaccttgaaaggcctcgcgcacgtattttctcttgaatgcatcagggcttttttcagttttcgttaaaaagcgtatcactgttgacaacgtatcagcccgcttttcccggtcggccttttttgcattttcttcattaaacataaaaccgatcagtttcacatacagttccttgtccatctctttgaagtgcagcccgatttcaatgtcggcctcgtccttcgtcgtccacatcacccgggccgggacttttccgaccgcatctatgatcagaccgtctacatgatagtacatatccgaatcagccgtataaggcagtctgatacgcgcgcccgtgtcgctcacatcgatcagttcacatttgtgctcatctactgaaacggtggaaaaagccgccggcttgttgactgtgaaacgctcagagcttcggaacctcggcctgtcaaaggcaacgagcagcgcaagtatgagccctgtcatgttatagagaacccaaaataaattatacgaagtgacgtttatatcaaacgtatgaagaaacaacaattcataaagggtttttccgagtgcaagcagcgtcattgcgagcaaaatcgcacacggcagcgccgttgtatatttgaattttcgccgatctgtgttgacgcctttcggtgtgactttaaaatcaaaccgctttttgaaaatgaattccgacaaggccgatatcgccatgtgcggcgccatcgatgtatcgtaaatatggctccagttcatactgcgctgccggtccgaaacggctttaaatgaaaggtaagaacctaaaaacgcaggcagccaaaacgaagtgatcgaccacagatcagtctttaagctatgtatgccaaacagcaaaaacatgagcggcgcgaggatgtataccatcttaaaaacgccgaaaaaccaaaagagaatgccgtcaaaataaaggattcgctgcatgggcgtcaagccttttaagaaaagcggattccacttctttccgcactgaatgtttcccctgcaccagcggtcgcgctgtttcaaaagatccatccacgtttccggcgagagaccgaccgcaagcacttctttgacgaaaacagatttaaattttgtttgcaaaagcatccctgttgccatatcctccgtaatcacacctgtcgcaaaaccgccgatttcctccaaagccgttcttctgaaaaccgtattgctgccgacgtacatgacagcattaaaacggtctttcccagcctggagcctgcgcatgaaaaagtcctgctcattcggaatgttcgctccggaaaataagttgtactgataaggatcttcattatagaaagcctgcggcgtttgaacaaaagccactttttccttcttaaaatagccgacggttttctgcaaaaatgaagggagcggaaccatatcggcatccatcgtcacaatcagttccccgtttgagcagctcatcgcatggtttaaattccccgcttttgcatgctcattgttttgccttgtaacgtaatgaacgccaagttcctcagccagcttttgaatagccgtccgccttccgtcatcacacaaataaatgttgacaagctcttttggatagtcgaggttcagacagcctgccaccgactttttcagcacatggcgctcctcgttataagttgcaatgagaatatcaacgctcggccgatggtcttgatcgcccagcttttccggctcccgcttcttttccttccatactagcgtataaaagaccaagagctgtaaaaagccgatacattcagttgcaatcaggatgacgcccatcacgatatcggcggggcgagagacgggcagcgtaaagccgaaccgccatacaatatacacaccgttcgtcataagacacagtatgattaaaaacttcttaaaacgcgaattcacccgcgatccccaaaaaccgatgagaatcagagcaatcattgccgcgggatagtagtgtaaaataaattccattttcttctccttatgtgatacataaaaaaacctttttacagggtttctctaaaatattcctttatttctttcttttgcactcaaatatattaccactatttgtcctaattttctttaaaaaattataaaaattatatctttttatctattaaaaactgaaattatacgactatagtctcttgttcaaaaaaatcataaggctcacattgataacccttcacatgtaccccgtatcaagattgaatcttttgtctcagacgtcctgtgtcttttcagagaaaggagctgaatgtatcaacgctttacaaaagaaaaaaggtctctgctcctaaatgtttgatttatttttgacggattaacagctattttgtgtcgatttttattccataaaaagggaatccaggaataattgcatcaaaaacggcctgcacaagggccattacctatatccagacacgtctttagccaaatggagctgttcttgatcattatgggaaaacagttaggtcttcctgcacggttgtctgaattttgatttttttagtatacttaatttagttaaataactcagcaaggggatcacataaaggatgggggaaagaatatggaagcaaaaacaaaggtacaacatataccgattcaaacaacaaaagaacaggatgaaaatttttttgcaagagcaatgaatgttaaaatcggcatcattccgctgcccgtatatttgctgctcttcgctttgattgtgacgtttgtctatatgcacgatctgaaaagcgacattttaacagccattgcggttacgggctttttcggattcaccttcgcccaaatcggaaagtcgctgccgcttcttcgttctgtcggcggtgccgctatacttgcgacgtttattccttcagctatcgtctattaccatctcattcccgatgacattatcaaatcaacaactgaatttacagaaaactcaaactttctttatttgttcatctctgccattgtagtcggaagcattttaggaatgaaaagagaaacgctggtcagggcgttcattaaaatttttattcctctgattgcagggaccattgctgcagcggcagtcggtctggcggtcggtacaatgctcggcctcggatttcagcatacgctgctgtacattgtaattccgatcatggccggaggggttggcgagggagctattccgctgtccatcggctattcggaaatcatgcacatgtcacaaggggaagcttttgcacttgtcattccttccataatgttcggaagcttaagcgccgtcattttgtccggaattttaaatgtaatcgggaagaaaaagcctgaattgacaggcaacggaaaagttgaccgttttgatagcggggacgcacagccgctcgaaagccgcgacaaagacaaagaaagcctttttaatctttcccactttgcgtcaggaggcattctcgccgtctcattatatttggtcggtatgctttcacatgacttgttcggatttccagcacccgtcatgatgcttctgctggctgttgccctgaaactgtttcgtctggctccggcgaatttggaaaacggcgcctacggcgtgtcgcgcttcttttcaactgctgtgacatatccgctgctttttgccattggcgtctccatgacaccgtgggacaagctgatcgcagcttttaatatcgccaatattattacgatcgtatccgtcgtggtcacgatgatagccgtcggcttttttgcagggaagtggctgaatatgtacccgatcgaaaccgcgatcatcaatgcttgccattccggccagggaggcaccggcgacatcgcaattctcagcgccgcagagcgcctcgagcttatgccgtttgcccaggtgtccacaagaatcggcggagcgataaccgttacgctgacgctgctgctgctagcccagttttattgatgaatgaaaaagcctgcagagcgagctgcaggctttcttattgtggctaccgtacttttttcggaacatagtcgggaaagtctgtcacaatcccgtccacgccggcctttaatagcggaggcacttcatcgcgggagcggacggtccaaggcgtaatcttcatgccgagcgcatgaattctcggcacaagcgtaggatcagcggccacatttttcaagttggcgttcacgtatttggcatagccggaaaattccttaagctttgcatctgttaagtccgccgcttttgacgtcaagacacctgtcggcatcgatggaagcagctgatgaattttatagacagagttaaaatcaaacgattgtacaatgatttttccgtttttaggcttatccattctccgctctttcaatgctgctgacacttttccttcgattcccggatagcgtgcaggctctttcaattcgatcagcattccgaccttccctttataccggtcaagcacttcttcaaatgtcggaatgcgctctcctgcgaactgcggaccgaagaagctgccggcatcaagcttgcgcagctcggcaagcgtcaaatcctttacggcaaccggcagcactgagtcaatatctgtcgtacggtttacggtcgtatcgtgaatgatgacaagctccccgtctttggacatttgaacatccagctcgatataatctgctttcatctgaagcgctttatcaaaagcagccatcgtgttttccggcgcatatcccgaagcgcctctgtgtgcaatgacatccacttttttaggcttcaccgccggctcttgtgcacccgcattcggtgcaaacagcgctgacccgatggaaaccccgatcaatgaagataacatcaattttttgaataaagctgacacatcatccactccccttttgctcttctcttgccaaagtataggttcgcactgttaagattatgtttcagcagtctttaattttcataaatttcctgataaacaaaaaaagatcccttggcagagatctttttttggatatatcagcgctcacaggcaattttgtctttatcgcggtccagcttcttattggcatcataaagcgcttttgaaacatacggcttgtacttcgtttttccgcctttgtttttcaccgatttcgtacgggcgacgccgcctttatagtctttgtttaaagctttgcagtttttgtacgtctttaccttcgtttttgcttctgccacatcgccggcgccccaggaaaaaccgatgatcagaccggcagacaaaagacccgctgctatttttttcatcccatttgacccctttcgtctatttgttatgtatcttttaccatgataaaatatttttcttattcgatcaagaaaaatatggcattttattgaataaaaagtatgaatcgaaaaagcgtctcttcgcacaaaaaccggccgttatgcgccggtttcatccacatattgatgttcgcaagtctttttcaaaacagcgttaatctcatacgctaattccttcggatggatgcacagcatgtcttccaaagggctgtcccagttcccgttctttatcaatttcagcgcataatggcctgccggactgcactcgggataccactctacatcgagcagaaggcgttcttcatcatgccgcagcttcaaaaggtcccgtttgaagtcagacagccaagccttgctgtcaggcgctagttcatcggggtttgtatcagttaaagagtgatgcgcaactgtccagccggccgggattctaagccttagcaaattgcgggcgccatcagaggcacgcatcaagtcttccaaccgttcgatcagctgttcatacggcgcgtcagaatcttcgctgaccttcgattgatcagcattttgcatcctgatgacgtacttcagttctccagcatattcaacttgtaccattttaccgcagctttcattctccaagatcaatagcgtatggcgggggtcgcgaatcggcttttgatacaaatgattttccttcaccttccagccggccggcaccatcaaaggatgcaatttaaagaaatactgagatttggtcaacgctctcacatcctctttcattgttctgtcttctttcctatcaatctatgtgccggacaggcttcttagaacaacggcggagcggccccacaaaaaaaccgcctgacgcttgttaaagcagtcaggcggttttttgtcttttattctccggttttttcttttccgtaatgatattttgatggatcaacaggcttgaagtctgaaatctcgtggaatctcaacagatctttatagagtacttggtcggacagatccagctgttcggacacctgcgatttcaggttttccgtctcttggttgcccttgatctcttttcctgtctttgtatcatatacggtcgtatcaatcatcgtgtacttcggcgttacatagtttccatttctgaaagccacggtttggtcgtggtctttagaaaagaggtctgtaccaaagttgatgtattttttgctgtcaataccttgcaggtgaagaagtgtcggcatgacatccatttcaccgccatacgtatggttgactccgccttttttgcccggaatgcggatcataagcggtacgcgctgattcatcgcgttttgatacggtgtaatctctttacctaatacttctttcatcgcacggttgtgattctctgagattccgttgtggtcaccatagatcactataacagaatcatcaaataatcccgcttttttcagctctttaaagaaatcttcaagcgcttcgtcaagatagcgcgccgtctggaagtaaccgtctaccgttttgtctcccgttgttcccttttcaagggtggcatcctcttcatccaaaatgaacggatagtggtttgtcaacgagattaaatgcgcatagaacggctgcttgagcgatttcagcttcggaattgattcttcaaagaacggcttgtctttcaagccaaggttgacgagattatcctctgacatatcatatgtgctggcgtcaaagaatttgtcatagccaatttgtttatacacctggtcgcggttccagaatgacttgtagtccccgtgcagcacggcgcttgtgtagccttctttttggttcagaatcgccggcagggactggtacgtattttgcccttttgttacaaacgcactgccttcaggaagtccgtaaaggctgttgtccatcatcaattcggcatccgctgttttaccttggccggtctgatggaaaaagttatcgaaatacatcatgtcatcctggccgtgcgccagcttgttcaagaacggcgtgacttcttttccgttcagcttataatcgatcaaaaacgtctggaagctttccaaatgaatcttgatgatgttcttaccttttgctgcgccgaaatactcgttattcggtttcgcataatgcgaatttgtatagttgatgacgctcgtcaggtcgtcgctgctcgcgtatgccttttggctcgcgttttgagcggcctgaacaccatcatagatcatgtaattgtaaggccccaaatacttgacgatgtaatttcggtcaaatgttcttgtcaaaagctccggacggtctgtctcggcaactgcaaggttgatgaaaaacagagccactccgccgagaacaacggcagcagcccatctttttttcagttgtgacgccttcagttcaggcagcttcacacatagagcaatcaaaatgatcaaatctgcgaaatagacgatgtcatgaaatgccatgatgtcaaaaacgccgtcagacatattgccgaggtttccggcttgttttaagtttgcaaacgtcaaaaagtcatcaaagaaacggtaaaacaggacatttgcatataaagcaaacgtcatcacagcatcaatgatgatgatccatatcgccgaccggcggccttttgcaaacaaagccaaaccgagtgcagcaatcgtgaagctcaatgggttgatgaacagcagcatgtgctgcgtagaccctttcacacctaaattaaactctaaaaagtaggaagcataggttttagcccatacaaaaacaacagctaatacaaaaaagcttagcttatgagagaatatttttttcatgataacctctacctttttaaacttttttcagaccgctttctgtttcagtcaatgaagcgtgaggaaacgataatatatcattctactaaaagtctcggcggttttacaagcacgtcctggtgaaatcccccggcttccctcactcaaacagtctacgcctgcgaaaaaaattttccgcatgtaagacaacggcctttaattaagacgaatgaatttccccaaaggtttcagttattttctttcatctagaaaattgcagtttcccggacgattaaatatctttatgaaattcatttaaataagcctttctttgcgcttctgtaaactgaccgatccattccgcacgcgcttcctccgtcatatacggcaggatgtacagctcgaccgctttataaaattccggctcaggcagaatgttgtacgtcggaatccgcaccctgccgttcccccgtgtctctatcagtatatccatcaagaaaatgcctttcgggctgtagcggtgctccgccattttaaggcttttgatgtccttgaacaacacagatttcttccctgagaatatccgcccgtcttctccctcgataatggtgaagatgatgtttccttttttcgtgaaggccggaaaaaccattagaaaggtcatcaaaccgtagatgaccccgaaagttccaactcccacgtacagcaaggaatattttgattcgagttttattgcttcataaaagagccatgctccaatcaatccgaaacctgcagtccctgcaaaaacccatactctaaaggacattctgcttttcacatcaaatgtctgctttttttcctgttccaaaaataattaggccctcctctacttcagcaagcggattccgctacaaataatattcatgccaagacctaccttaccacagaaaccagttcctgcataaaacttcatgtatttgtctgtccctaatcagaatgaatacagaaaaggctcccggccatctgccggcagccttcccctattttgaaatatcaacaaatccctcgccgaatacatccctgacatcgtggatgatgacaaatgcttttttatctgtgcttctaataattttcttcagcatggacagctcttgtttattaatgacaatgtataaaatttctttggagtcgcccgtatagtgcccgcgtcccgataatatcgtgacgccgcggtccatcagggtattgacctgcgccgcgatctcgtttttatgctcggaaataatcgtgatcgcctttttcgtgttgagcccttcgataatgaagtccatgaccttcgtggcgatgtacagcatgacaatcgtaaacatcagcttttcagctccaatgataaagtaggaactgaagacgacaactaaatcgatcatcagcaaggcatagctgatgttccagtcaaaatatttattggcgattctcgcgagaatcgcagacccggcggtggttccgccgacacggatgatcatgccgattccgacgccggcaaataccccggcaaagatggtgctgatgatcacttcatcggccggcaccgtccaatcttcggtgacgtgcagaaagaacgaattggccgccaccgcaataatagtgtaaatcgtcgtctttttatccaaaaagcgatagccgataatcagaagaatgccgttcagtacaaagtttgtgatgcccggagaccattcaaaaacgtagtataaaatcagcgtgatccccgtgacgccgccttctcccaagtcattcgggatggcgaacagattcacggctaacgcaaagaaaaatgcgcctataatgatcaatattatgtccattgctttctttttcataaatacatccccttcctttgtccttaatcgatttcctgtaaaaagtaaaaaagcccaggagagaagctctttgattaagagcaaaaactcctgggcttttatcccaccgtgtcataacgatacttcgctatgtgttttctctcggaccagaccagcgcgggagggcactgcggaaccctagaaaaccaccttttctctgctatcaatttgtcatcttcaagcattataagtgaaattctggggtctatcaacccctatatcagcctgaaagatttgtttttttgtaaaatagcttccatctgtcagcgataaaaccattctataataatagatatacgtgttttgcctgggaggcgctcttatgaacaaacaaaaacggcaatggctcatcaagcagaccattctcgaacatccggtagaaaatcaggaacagctggcatccctgctggaaaaacgcggcatcaccgtttcgcagtctaccatttcccgcgatattaaagaaatgtatcttgtgaaacagcccggtgaaaacggaaaacttgtctacacgacaaatgcttctttatccatcaatccttccaaaatattaaaagataaaatctctgacgttgtcctgcatgtgcatcgaacggacaacttgatcattattaaaacaatgcccggcaacgcccatgccatcggcgttcttcttgataagctcggaagcccggaaatgctgggctgtatatgcgggaacgatacatgccttgtgatttcccagtcacctgaggcagcccaatcattttatgaccatttatgctgatccggccgtccggatcagctttttttgcccttcaaaaaaatttttttcgagaaatccccgttaaaaatatacacgttttatacgttctattctccgctccgacaggaacttattttccatttatcataattattcatttttgtttttgcttcatcaaaaaacatgtgaaatatatcacgtttttgttgttatcgctttcacatcgcgcttttccttcctgttttaagctgtacatgtaacaaaaagagcttaggaggcgggatgatcatgacaacaccgatacacgtttactcagaaatcggccctttaaaaaccgttatgctgaagcggcccggtcgggaactggaaaacctcacacccgaatatctggaaaggcttctctttgacgatattccctttttgccagcagtgcaaaaagagcatgaccaatttgcagaaacattaaagcaacagggggctgaagttctttatttagaaaagctgacggccgaagctttggatgacgcattagtccgcgagcagtttatcgatgagcttttaacggaaagcaaagcggatatcaacggcgcatacgacaggctgaaagagtttttgcttacctttgacgccgattcaatggttgaacaggtgatgagcggcattcgaaaaaatgagcttgaacgcgaaaaaaaatcgcatcttcatgagctgatggaagaccattatccattttatctcgatccgatgccgaacctttatttcacaagagatccggcggccgccatcggcagcggactgaccatcaacaaaatgaaggagcctgcccgccgaagggaatcgctgtttatgcgctacattatcaatcaccacccgcgttttaaaggacacgagattccggtttggctcgaccgtgatttcaaattcaatatcgaaggcggagatgagcttgtcttaaatgaagaaaccgttgcgatcggggtatcggaacggacaacggctcaggcgatcgagcgtcttgtccggaacttgtttcagcggcagagccggattcgccgtgtactggccgtcgaaataccaaagagcagagcctttatgcatttagataccgtcttcacgatggttgaccgagatcaattcacgatccatcccgccatccaggggcctgaaggagacatgcggatcttcgttcttgaaagaggaaaaacggcagacgagattcatacaactgaagaacacaatttgccggaagtgctgaagagaacgctcggcctttcagatgtcaacttgatcttctgcggcggcggagacgaaattgcttcagccagggagcaatggaatgacggctccaatacactcgcgatcgctccgggggttgtcgtcacctatgaccggaattacatttctaacgaatgtttgagagaacagggcattaaggtaatcgaaatcccgagcggggagctttcaagaggacgcggcggcccgcgctgcatgagcatgccgctctaccgagaagatgtgaaataaccaacctaaagaaaaaggagagagatccatgaaccaaacgattaatttaaaaggcagaagctacttagctgaaaaagatttttcagaagaagaaatcctctatttgctcgatctggcccagaaactaaaagaaaaaaaagcacaaggcatcaggcatcgctatttggaaggcaaaaacatcgctttgctgtttgaaaagccttctacaagaacgcgctgcgcttttacgacagcctgtatcgacctcggtgcgcatcccgaatatttgggcaaagacgacattcagctcggcaaaaaagagtcgatcgaagacacggccaaagttctcggccgcatgttcgacggaattgaattccgcggatttgaacacgaaaaagtgatctcactggcagagcattccggtgtgccggtatggaacgggctgaccgatttatggcatccgacgcagatgcttgcggactttatgactgtgaaagaacatacgggacgcgtaaaaggcgtcaagctcacctatatcggcgacggccggaacaatgtcgccaacagcctgctcatcggcggcgcaaaagtcggcatggacgtaagaatctgttcgcctcaagagcttttccctgatcaggacatagttaaaatggcggaagcgttcgctgaagaatccggcggaaaaatcaccgttacaagcgatacagataaagccgtgtccggagccgacgttctgtatacggacgtctgggtatccatgggggaagaagacaagtttgcagaaagaatcaaactgctcaagccttatcaagtgaatatggatctcgtcaagaaaacaggcaacgacaacgtcatcttcctgcactgtctgcctgccttccacgaccttcatacaacctacggacaaaatgtttacgaacagcacggccttaaagaaatggaagtgacggacgaagtgttccgcagcaaacactctaaagtgttcgatgaagctgaaaaccgcatgcacacgattaaagctgtcatggcagcgacgctcggcgatcttgactgacaggaaaagggactcattcccttttccattctaaaccgaatgaggtgacaaaaatggcggaagaaaaaaaacttgggctgtttgcgctcatcgcgcttgtcatcggatcgatgatcggcgggggcgccttcaaccttgcaagcgacatggcttcaggggcgggggcgggagccattttaatcggctggatcatcaccggagtcggcatgattgccctggcattctctttccaaaacttgacgacgaaaaggcctgatttagacggcggtattttcacttatgcccgggaaggattcggccatttcatgggctttaacagcggctgggggtactggttcgcagcccttctcggcaatgtcgcatatggaacgctgctgttcagcgcaatcggatatttcatccctgcgtttggagacggacaaaacatcgcatcaattatcggtgcaagcgtgatcctctggtgcgtgcactttttgatcctccgcggtgttcagtccgctgccatgatcaacttaattacgaccatttcaaaacttgtaccgattttcgctttcattatcgccattatctttgtgtttcatcttgatttatttacgaacgatttctggggaaaagggctgtcgctcggttccatcggaacacaggtcaagagcacgatgctggtgaccgtctgggtgtttaccggaattgaaggggccgtcttattttcaagccgggccaagaaatcaagcgatgttggcaaagctactgtcatcggcttgatcagcgtactcgtgatttacgtcatgattacgatgctgtcgctcggcgtcatgaatcagcaaaacttggccgagcttccgaatccttcaatggccgcgatcatggagcatatcgtcggcaaatggggagccgtgctcatcaacctgggattgatcatttccgtattgggcgcctggctggcctggacattattcgcgggcgaactcccgctgatcgcggcacgcgaaggggtcttcccgaaatggttcggcaaagaaaataaaaacggtgcgccgacaaatgcgctgactttgacaaacgccattatccagctgtttttgctgacgtttctcatttcagatgcggcctaccagtttgcattttccttggcttcctcggccatcttgatcccgtatctgttttccgggctttatcagcttaaatacagctggctgcacaaagagcctaaccggggcaaaaatctcatcatcggcatcatcgcaagcatatacggcgtctggctcgtatatgccgcgggacttgattacctgcttttgaccatgattttatacgctcccggcattctcgtattccgggctgtgcgcaaaggaaaagaaggcccagtcttcaataaagccgagcttttgattgccgccctgattcttgtattggccgtgatcgccgtgatcagactggcttcgggaagcatttcaatttaacaaaacagaggtgattattaaatgaaaaaaagaaaaattgtcgtcgcacttggcggtaatgccattcaaaccggagatgccagcgcagaagcgcaaaagcgcgcgcttgaagaaaccgccatgtatttggcggatatgatcgacagcggcgctgaattaatcatcacgcacggaaacggcccgcaggtcggaaacctgatgatccagcaaaaggaggcggattctccgaaaacgccggccatgccgcttgaaacctgtgtttcgatgacccagggaatgatcggctattggctgcaaaatgcccttgaccgggcgcttcacgcaaaagggaaaggcggacatgcggcaaccgtcatcacccgcgtcgccgttcgaagcgatgatgaagcgttccgcaacccgacaaagccgatcggtccattttacagcgaagaagaagcgaaagaactgatgaacagccgaaacggcggcctcgtttttaaagaagatgccggaagaggctggcgccgcgtcgtaccgtctccggccccggtatcgattcttgaacacgatgttatcaatgatcttgtcgaacacggacatatcgtcattgcagccggcggcggaggcgttcccgtcatcgaaaacggcgatgccgtctccggtattgacgccgtcatcgacaaagactttgcagcctgcaaactggcggagcttgtgcaggctgacgaactggtcattctaacaggtgtcgactatgttgccgtcgattatttaaagccgacagaacgtgcgctgaaacgcgtcaccaccgaagaactgaaaggttatataaaagaaaagcaatttgcagaaggaagcatgctgccaaaagtcaaagcagccattcagtttgctgaagctaaaaaaggcaacaaaacggtcatcacatccctgaaattagccaaagacgctctccaaggaaatgccggcacgattgtcgtccaagcctaaatgcaaaaggaagggctcagggagggttcttccttttgccaatcgtcaaaaacaagtaaaatttaaagtatatagccgcaacataagaaaatcgataagggtggtccatatgaagaacaaagacatcgtacatcagctgaaaaagtttcctcttctcgcttccctgaataaaagagatctggaagatatgaaacagtttatctattggcgctcttaccataaaggccagatattatttatggaagacgacccccgggaacgaatgtaccttcttctcgacggctttatcaaactcgaaaaatcaaacgaagccggatccatgttttataccgactatgtacgtcctcataccctctttccatttggaggcttgtttcgggatgagcattatcactatgccgccgaagccttaacagatattgaactctactatatacccatgaacatcttcgaagatctcgtccgggacaacaaaaacctgctttacgatattctcaatcatttatcagacatccttgcccttcacgaggaaaggctgaagcgcatcacactctcccatgcccacgacagggttacacaagccatttattatttaaccgaaagcctcggtcaaaaagaaagcaactcaaccgtcatcaactgtccgatcaccgctgccgaaatcgccaaaatctcggggacatcccgcgaaaccgtcagcgccgtcctgaaaaagctccgctgcgaaggcgttatcagtcaaatgaacaagcagatcatgatcaatcggccggaatattttatgtaggcatatatgagaaatcatcccggcgacaagcgggatgattccccgccgtttttatttataccggaattcctctgtttcaaaccgtctgtttttgatgatatcccgataaaagcaagccgattttttcagcgccctgctgcggttgttctccaatcgaatctcgacaaggccgtagcggtttttaaaggcgttcatcggagagacgttgtccgtgaatgcccaaagcatatatcctttgcagtttgcgccgtcggcgatccctttcatcgcctctcgcaaatgggctgaaataaaatcgattctgtagtcgtcctgaatgaccccctcttcatttttaaaacgctcttcatgttcgacgcccatgccgttttcagcaatcagccattcgatatttccatactcatatttaagtctcatagccatatcgtacacaatgcgcgggcagatctcccagcctctgaacggattcatctttctgcctggcagctcaaagggctcatagtaataagcaggatgaaaaggcgtcgattcattccattgccttgaaggcgcttgaactctcttcggataatacaggttcacaccgacaaaatcgaccgtattccgcttgatgacggaaagctcttcttcatcatggtcaaaaaggatgtcgtgtttggccatgagctccatcaattcatcgggatagacgccttttatgctcggatctaaaaaaaccctgttaaaaaacaaatcataaacttgggccgctttctgatcatggggcgcgcttgacctcgcatacgcgacctcaggatttaagatgacgccgatttttgcgccttctctaaaactgggcttccttttccggaaaattgccacggcctttgctgtcgccagtgctttatggtagttccactgcatccattttttcgtgttctgctcgtacggatagcgaagtgcgtcaaggtagatccgtgtttgcggcacgatcggttcattaaaggtaaaccagtatttcaccctgtccccataccgttcaaacgctttttctgcataagccgcaaataagccaaccacgtgttttgatccccatccgccatactgttccagcaggacagtcgggatttcgtagtgctcaagacaaagcatcggttctactccgcatctcttcagctcatcgatgacgtcatcaatgtagcctgcatacacctcgtcaacttcggcggtttcataatccaaaagaaaccgcgaccagttaatggatgtccggtagtgggttagcccgatgtctttcatatattgaatatcttctttgtagcggttataaaaatcggttgccacagccggtccgtatccgtcatgccatacatcaggatcatttttgtaccacatatccaaataggaatcctgtgtcggccgcttcccgtcccacccctctgtctgccacgccgacgctgctgcgccgagaataaaatcgtcgggaatcttccacgtttgtctggccatctcattcacacctttctttgctttacatagacacatttttttcagaactaatcgtaaaggtccgattcaataaaataacaaacggaagataaataaggacggagacgatgatgcatacgatttgtgtgacgacggcaccgaggcttcctcctgttgacagccaggcattgataatcggcggtgtcgtccacggcaccatgacaacggcttttccggcaaagcccgccgctgtcgcgatgtaaccgatcgcacccgtcacaagcggcgtcacaataaatggaatcgccattaacggattcagcatgacgggaaccccaaagatgaccggttcattgatattgaagatgccgggaccaaacgaaatctttgtaatgctgcgcaaatcctcccgtttccccgcgataaacatcgcgatcaacagaccgattgtgacgccggatccgccgatgctcatgtacacatcccaaaacggcatcgtaatgatattcggaatcgattcgccggctgcgtatgcattcatattgacggtaatcgaagcgagcagcaaaggctccctgatcggcttcaccatctggtttccatgtatgccgatcacccagaaaaactgtgcgacaaacaccagcaagagaatgccgggaagaccttgaatcgcgccctcaagcggcttttgcacgacattgtacacggcttcatgaagatatacccccgtcagccgatgaaacgcaaatccgaagctggcgatgatcgtgacggtaataatcgaaggaaataaagtgccgaatgatacagagacatttgccggcacgctgtccggcattttaatcttgagccggtccatgcttgacagcttgctgaagatttcaacagacacaatcgaaataaacatccccaaaaacagcgacttcggatccgtaaattccttggccagcacgttaaccacttcctgcatcgaaccgttcacttccaacagcaccgccgatggaatgacagagatataggacatgagcgccatcaagccgggaaaaaacgattcatgcccattcagcttcccgagctcaatcccgatcaaaaacaccgcgccgatcgtaataaagttcagcgtcgcataattgattgacgccataatcggctcaagcgcagacaagaaccgaaaaggcctgaaaaccgcaagtcccgtctcggggctcatcaccatattctgcatcaaaaccgcaaacgccccggcaatgatgaccggcatcagtgtgacaaacgccgacttaatgaccatgatatatttgaaacttgtaattttaaaagcgacccgctcaaacatctcagtcaccttcgccatcctgctcatttactctccccctttttttggtggtttgcttttactttataatgaaaacgctttcttttcggtgcatattttttcctttgggagaggaaatttttcaggttggacggccagcaaagcagacaacccgccgtttcactgaaacagcgggtcatatattttactgtggcaactgcactttgatcggcttaaacggtgtagaataaaatgcgcttaaataaccaaattcgacatcaagcgaatatcggtcaaggctgaagtttttcgctccaaattcaccatctaacgtaaagtctgatcggaatcggagctttttaggatcaagcacttttgtaaaattaccttttacgctgtgtcccatcggcgcttcgtcaatgcttttataagcagaatcaaccagtgacatcgtttctaaaaagttttgcatgctgtcaatatcaatcttagattgatcgacatgtttcagatgatagtcgacagacaatttacttccgttttgtttcacctgatcaacggcaatctggaagtcatgacggtcagcgctcagcgcggcgggcgtttttgtgagaggcagcgtcttttcggaatcgcccatactgctgctcgcctcaatcttgaggtgttttgttcctttattcacttttccaaggatcagcctttcttcgtgacgaaccttgtttccgttctttgtactgtccgtcgtccactgcccgccactcaaataaggaatttcatttcctttatcatcggtcacttttataaccgatgtacgatcgttcggatgttcctctgaattggatacttcatagtcgatgacagtcgattcttttccgagaattaccgtttttacggcgagcttatggccatccgccgattgtgtattgtttttggttatgtggagcgttttatacggcagtttatcaaccggaatgtcgaacttccatttccctctgattccgttaatatttgtgatcgtaaccgggagtgtcagtttatcgggaatatgtttgtctggatagcctacttgaatgtagccggtatagccgtcctctgttttcttcaagtctccttgagaagcgatagcccatttgcgctcgccattaaataatgtgaaatgaatcattctcgctccatcatctaaatcttttcttgtatcgcttttcaccttaaacgtcataccgatgattccgccgtcaaaataaacgcttgtagctgtcacgtctatgttgttgctggacgctttctcgttcagttcagtgacaagctggcccgccaccaagttttggccgacatagtcatggaattgttgatacgcttttccaatcagcgggacgtcagccaacacgctttgcatcgctggggaaacgaagccgctaccgagaaggagcacggcggccgcgctcgaaacaaaaacagtccttttcacggcgcgcttcggccgaaacgttttttcccgcttggcccgcttgatgcctttatcaatcgattcgcggatttcttttgtagggacatcgatcttgtttacttcgtttttgaaccgttgtttgtccatgcgtcttctcccccagtcagtagttgttttaattcaagcttcgctcttttcagataggtcttaacggttccttcaggagcattcatcacctcggcgatatcatgaatcggcaggtcgtgataataaaataaaatgatggcggtttgatattcttttcgcaactgctgaacagcttcaagcatccctattctgtcgtccgcatgcatctcctgctcccggccttcgtcctgcagcggcctgtccattaaaaccactttctttttcttgtccaatatggcatatgcatgatgaatgaggattttcgtcagccatgtcaaaaagtattcgggattcctcaactgggcaatcgataaaaatgccttgtacgccgtttcctgtacgatatctaacgcgtcctccttatttcgcacatatatgtaagctgttctgtaaagctgttcgctgtgcttttgaaacagcatttcaaaagctttggcgttgcctgcgacagctttcttaactaatctgatttgcttcactgctgcgcctccttcaaacattagagaggagaaatgatgagaaaagtttcagaaagatggtttttttcacataaaaaacccgctttaggtaatatagcgggttcaaatgttagtttctgttggaaactttatgtttagataattcttcgtataaactttgcaattgttcttgacgaatcattccgttgattgaaactgtgccatcgggttctaaccgaacttctattttatttgaaattgattgaagctgaccttcaagataacgatatctctcagtcaaaaaatgatatcgttgattagaggaacctgtccatggccggcttaaatctatattttctttttcgaaaggaccatcaatgaacaaatcagtcaattcaagtaactctagctggccctttcgtggattcgactttatatcttccaagtatctgccgctaaaggtcaaaatagaaagtccagcaatttttattttatccgcaagttctgcaagggcttccgcttgatccattggctcaccaccaagaaatgttacaccttcaatattgttttctttttttgaatcaacaatctttttaaagaggtcgtctacactgatgtcttttccacccttgtcagaccatgtccacggtactccgcagccttcgcagcgtaccgaacatccctgcacccataaacacgcccgtttaccgggtccttctgcttcagtaagcggcaaaaaacgatggattcgtattttcattaaatatccaaaacccttccttcagcattctcatcttttctatcccttcggtcaactggtttagagaatgagagatacggctctaccttcaaaagcacatgcggcttcaatcctaactgttcgccgaaatgatcaatagatgaaaagccaccgatttcttcacgcatggcgaccgcttttttggcgaggataattcccaactgcggaatcgaagcgatgtcttccacactcgcttgattaatgtctattttccgttccgattgtttatcggtttggctcgttcgagccgcggcggtctctggatactcatttttcagagatttacgcagctgatctatttcagcgcgtttcaactgttgaatggactctaaccgaattaaaaactccggccgcacttttaaagcgtgaacaattgagacaccccagccgatgatcaaaagaaccatggccgcattgaataaaggtgttccattagaaagaatagtgaataaaaaaatagcaaaatagatccatccggcaattaaccattttttttgttttgcccgagcgaaaatatagaaaaaagaaacccaatttaaaaagccaaaaggagtaaatacaaataggacccatatggattgaaacagctcccatttcactcccttattggtatatccattagccattacggtgcccccttataatttgctgatgcctcaaaacatcaacctgttccgtctcaaagtattccgccgtatatgatgaatcaatcgtttcagcctcaagcagctgttccagaactcgaatataatctcggcatttcggtcctttaatcccttttgtttccacattaatttgaccatcctgctgaatttcaacaataattcgctgactcatgaaatgcctccttatccattcaccttgaacgtcaataccaccgaattctcatttgtcaccgtttcattttctaaaaccaatccttcatgttcggccttttctataagtttcaaatatgtttcctgctgcaatatccgtttgtactcctcttcaatttgatcaataaattcccgcgcctggtttttatcaactgaacgatcaaatgcagctttaaaggtgccttcttctgtcaaatggaaagttacagctgaatcttccatgattgcttcgacgtttgttgttccaagctcgatcgtcttacatccattttggtcaagcgcttttttgagaaggtcttcatccttcataacggtaggcattgtataaagacggcctgattcgttttctgccaaataggatgcaatcgcttgggtcgctgcaatcgcaactggtaataaaacaatttcaatactcatgctttgacacctcttcctaaaactctacagctctgccaccccggcttgtatgtaaatcggcatctttatcacgcggattttcgtcatctttctttagctgaatagattggtattccttcagatcttcctgacgggcagccgatacagcccgaagacttgcccattcccgaattgcaagaatttgctctgattgcgtaacagccaaaggaacagtctgcttaatcactttctcaagatcctcaaccgttaagcttcgattttcagaaaaggcttcaaataatgcagaaattacgacttgttcgatttcagcaccaataaatgattccgtcagttctgcaagcttgtccaagacaggtggttctattgaaaaattcccggcagctttcgggtttgttagcctcttttcaagatggatgcgaaagatttcttttctttcttttttcgttggcagatcaacaaaaaatatctcatcaaaacgtcctttccttaagaattcgggcggaagagcgtctatattatttgcagttgctatcacaaatacaggctttgatttttcctgcatccaggttaagaaattcccaagcactctcttcgaagtccccccgtctccagctgttccgctattccccaatcctttttcaatctcatcgacccacaaaatagacggagaaatggcctctgccgtagataaagcgtttctcatattttcttcactgcttccgacaatgccgctgaatatttttcccatgtccaattttaaaagaggaagcttccacatagagctgacagctttagcaattaagctttttccgcagccgggaacccccgttaatagaagacccttaggggatggcagcccatagtcctgagcggagtccatccatgacttgtttcttttattcaaccaacgtttgatattttccaatccacctacatcctggatatttggttcacttttaataaactctaatacgccggtttttttaatgatttgctgcttttcaaaaagaatttgatcaacgctatccgaatctagacgccctttgcttactagcgccagtgcaaacgcattttctgcttcttttaaagttaatcccagtgctgcttttactaggcgttcttcttcgtcctcagtcaagctaacgattgcccgattttgcccttgattcatttcgatcattttcttgagcgtttctttaatttctgcaaagctgggcaattgaaactctacaattgtgatgtccttttccaattcaggaggaagcgttaatgttggcgccacaagcacaacatttttggaaacaagactcttttccaatacagagacaagatctttcattttacgaatcaaacggtattcaggggggcgattatttgcacccaaataaacataaaaatccttcaatataaagactgctggctgatcatatttttcaatgaacgccaaagcctttaacgggtcttttgtttcggctgatggaggcattccattgctttcaaaccctttggttaaactccaaacaaataaggttcttggtgttctaatcaattctgtatccgaaacaatatgactcagttgatctatgacacgttcttcttcccatgtagaaatatacaggaacggaaagcgggccctgaaataattcgctacttcttttctaaagtgatgatatccttccatttttctccctttctattgacctattttttattattatactaaatttttccacaacaggaataaaagatttcaatcctcccattcgccttctctaaatgataagattaaaataaaaccaacaattggagatgaaggaaacatgaagaacaaattgattgaacgcctcatttcttatgcgaaagtggatacgcagtcaaatgaaaacagtcagacgacgccttccactcccgggcagctggcgcttgccaatatgcttgtcgaagagctgaaagagatcggcatgaaggacgtcacaatcgatgaaaacggctatgtgatggcgacgcttccttcgaatacagaaaaagaggtgccgacgatcggtttcttggctcatgtggatacagcaacagattttaccggaaagaacgtcaatccgcaggttatcgaacaatacgacggaaaggatattgtgctgaatgaatccctcaatgtcgtcttatcgcccaaggaattccccgagctagcagattatgcgggacatacgttgattacaaccgacggaacgactttgctcggcgccgacaataaagctgggatctctgaaatcatgacggcaatggaatatttaattgcgcaccccgaaatcaaacacgggaagatcagagtcgcttttacacctgatgaagagatcggcagagggccgcacaagtttgacgtcgaggcgttcaatgccaaattcgcgtatacggttgacggcggaccgcttggcgaactgcagtacgaaagcttcaatgccgcagccgcgaaaatcacttgtaaaggaacgaacgtccaccccggcacagcaaaaggaaaaatggtcaatgccgccaaaatcgcgatgcagttccacgccgcattgccggaaaacgaagctcctgaatttacagaaggttatgaaggcttttatcatctgctttcaatcaagggcgatgtttctgaaacgagcctctcttatatcattagagattttgacagagaccgatttaacgagagaaaagacaccgtccaaaaaatcgcaaacaaccttaaagcgaaatacggcgaaaacagcgtcacagtggacatgaatgatcaatattacaacatgagggaaaagatcgaaccggtcaaagagattgtcgacattgcctataaagcgatgaaaaaccttgatattgaaccggtcgttaaaccgatccgcggcggtacagacggctctcagctctcatatatggggcttccttgtccgaacattttcacaggcggggaaaactttcacggaaaatacgagtatatttccgccgacaatatggtaaaagccgcgaatgtcatcgtggaaattgtgaagctgtttgaagaaagagcttaaacgaaaaaagcggaaagcggctgcaagacaaagcagccgcttttttttccagatcaatctttatctgcgctttgctgaaattagaacatgttgcaaggcggtttctttttggagcgggataaagccaattaacatctcaccgatgcaaaaaattctgttcatttggcttcatcacctttccaaatatctttcaacgtccagtaagtgaattcttcaacccgtacgttgcctttctcagaaaacagctcaatccccgctcttccttccttcggatatatgcggcttgtcattgtcgcttcaccatgatttgcaaatacttcaatagacgatctgtcgagaaacagatgcaaagtgagcttctcatccgcttcaagccgtacgtttctcacaccgtccctcgctttgccggactttgaacagtcgagcgtcagcttttgatcaatcaagctgtacttgatggttgtttcttcctgttcaattccccggatctttaagccaaccgtttcggcactgcaaattgtcaaatcaaaaacggccaccacttcaagaagcttttcggctgtctttataaaatagctgccggaaatcgattgattgtcacactcatgatgttccgatccacgaagtaatttagtctcctcgacgggattcattaaaattttgtgaccatccttcaacgtcaattcacgcggcaaagttaatgccccgcaccatccgtctgctttcgtcggcatctctgactcccacatatccatccagccaatcgcaattctgcggcctttgtcatccaataaagtttgcacggcataaaagtcgtggccgtgatccaactctttaaaggagccatgtacaaactcattcgtttcttcatcatagtctccaatcaaatagcctgtttgatacagattttgatatgattcaccatcagcctctataccctgaggggaaatcagcaaaatgtgtttgccgtctagttcaaagaaatccggacattcccacataaagccgagatttccgtcgctttgggcgagaacgcctacgtactcccaatctacaaagttaggcgagcggtataagatgacccgcccgacgttctcttttgaggagtttccgaccaccatataccagttctcacgatgcttccatacttttggatcgcgaaagtgacgtgcgctgtcttccggcggctctgcaataacagggttttctttcagtttttcaaagacgataccgtctttgctgactgctatattctgagtttggtagaaatcgtctttctcttcatctatcatattatgcccagtatagattaaagcgaggtcgccgttatattcgactgcgcttcctgagaaacagccgctctcatcaaattcgtctcccggcgctaaagcaaccggcaagtgctcccagtgaataagatccttgctcttcaaatggccccaatgcatcggcccccaattctcatcatacggatgatgttgataaaagacatgatactcccctttatattgaataagtccgtttggatcatttatccagtttgcccggggcatcatgtgatagcccattcggtaacggcgattcacttttttcccggctttctttaatgcttcttctgcctgctgaattctgttcatctgtgacatcctctctatatatgattgctttgtagattttgagcaaattcaacatctttctttgagtctagcaaggtaaaaatcgaaataatggtaaaacaaaggaccattgctcccatgatgagataagtgtggcgaaatccgatgctgtcgtataaacctcccgcaagcggcgaaaaaatcgacgtgcctacctgggatgcgaattgaaagccgacaagataaagtacggatgaaagacgattatcaaaattagtcgccaaatatttaaacatcgcaatcagcataatcggcaattctaaagcatgaatgagtttcatcgatgaaattccgaccggtccgctgacaagtccggaaccgataatccggaaagccattaacagccccgctaaaatcaagctttttttaggaccgagcttattgacgatgaaaggcgcaagaaacatcatgcccgcttcaataaatacttggaatgaattaaggtatccaaatatttggttccccaaggccgcagtcggaaataaggaagcgtagtaaagcgggaactgctggtcatagacgccgtacacgcatgttacgccgatcacgtacagcatcaaaaaccagaaatcttttaagagaaaaagccctcctacgtcttttaatccgaccgagtctgctctttccttttcatcatctgtcatctcaatttttacggaaacaataatggccaccaatatgattgctgaggcggacgcaacccagaagttgatattcggatcgatattgaacagctgacctgcaaaaaatgtcgccgcagcccagccgagggacccccacatccttgttcttccatattcaaattgatatttgcggctgaccttttcaataaaggtttcaatcgcaccgattccggcgagaaaagcagttcccaaataaattcccccgacgatagccccaagaaagacgttgtattgcaaaagcggtccgtagacgaaaatataaaagggacccgtaaatacgagcagcaaactgatcataaataatatgtttttcttcagcccgagcttatcggagataaaaccgtacaaaggctgcatgcacaaagtaaagatagcgtttacagaaaagataatgcccgtcgcggacccgttcaaattgatttcttgccctaaccaaatcgcaaataaagaatagctggaagaccaagtaaaaaagaaaaagaaaaaataggcgcttagtttccaatacagactgtttgagcttttcattttcatttgctcctttaacccgatttggatgtatctatttgatgcctgtccctgaaccgcccaggccatctaaaatgtagcgttgggctacaatgtagatcagaatcagcggaatcgtggaaatcgtcaagacagccatcacctggttcgtataaaccggctcggtgctgttgatggctgtaatcgccacctggatcggaaatttcgacttatccgtcaaaaccatcagcggccaaatatagtcattccagctgccgataaaagccaatgtccccaccgtagcgacagccggtttggacatcggcagcatcacccgccagaaaatctgccatgtatttgctccgtccagcttggccgactcaatcatctcccccgggatcgccatgaaaaagtttcggaacaaataaatattgaaagcccccgcaagcgccggcaaaatcacggcaaggcgcgtatcaacaagtccgagcttatgaacaattgtaaactgcgagattaaaatcgtttccatcggcacgattaaaagcgccagcaatatggtaaacagcacttttttacctgtgaattgcagcttggcgaatgcaaagcccgccattccgttgataatgaccgctcccgctgccacacacaaaccgtaaaacagactgttaccaatatacattagtaaatcaaaccgtgacagcacttccctgtaggattgaaaccattccgacggatgaaaagacggaagaaacgctttaatgctgctgatattgttgtaaatatcggcttccggtttcatcgatgaagcgaccatccaaatcagcggaaatataaacagagccgccagcaaaacaaggcatatatattccagtatcgttaaaggtccgaatttccttctcatccgccttcatcctccttcaccaacttgcgctgcgcaagcgtcaccaatccaattatcgtgccaaacaagagcgcaattgaacttgcatagccgaccatccgatcggtaaatcccgtttgataaatataatagacaactgtcatcgttgaattgaccggtcccccctgggtcatgaccattggctgcacgaggagcttaaacgcactgatcagcgtcgtaataaagataaaaaccgacgtcggtttcaacaaaggcaatgtaatataaataaaccgctgccatttattcataccatccaattgcgccgcctcgtagacatctccgggaatgttttgcaggcccgctaaaaaaatcagcatctgaaatccggctccctgccagactgaaacgaaaacaattgtaaagatcgcctgattaggacttgtcaaaaacggctgtggcggcaaaccgacatgcgtcagtacgttatttatcattccttcattcggattcagcaagtacagccacaaaacggagatgacaacaagcgacatgacgacggggctaaagtatgcgactttgaaaaacgtattggccttgcgctttttattcaacagaagggccagcccgagagcggccccgatctgtaatggaatcacaaggacaacaaatttcaatgtgttgctcaaacttttcaagaaaatagggtctttgaacaatttgataaagttgtcaaaaccgacaaacttgcgcaggtcaggtgttaacaaataataatctgtaaatgcgtagtaaaccgccataatcgaaggaatcacgagaaacactgacaaaatcagcaaggccggacctaaaaatgtataggccagcacattgtcccgccaccctattttactggcagggatttttttcagcggaaaggccgtccttgcttctttcaacggaattttattcatggctccaccttctagtttgccttatcgatggctgattgcatttcttttgcacgcgtatccagaaccgattgaatatcctgatgctgatcaaagaagctgatgtcatcgatcgcttgctgaaatgcgcgcgtcacctgtggatatgccggtgtcaccggtcgtgcatgccccgtttctttcagctgctgcaagaagacattcatttcatctgagaattcttttgccagcactttctctgatgaatagcgcacaggcagcgcggcgatcgaacggctcaattccaagttggattccttgtttgtcatccaatcgaccaattttgccgcccattccttgttttcagacgtctgtgtcatggcaaactgccagcttcctgaaggggacacaagcttttttgtttttggcgacacaggatacggcatcacaccataatcgacattaggaaaatttgtttccatgtcggttaccgtccagacaccgctcattttcatcggatatttttccgtttcaaacgcctgcttaaccggagtccgggtcgtgtaaccctctttcagcattgtttgaataaatgtcatcgcttcaacggtcagtttgtcgttaaaaacaccctccgctttcttgccatcttttgaaagaacatcgccgccagccgaccaaacaaatggcaaaagcgcataggtcagcatttcgtcttttgactgcaactgcatatcgatggccggtttgtcatatttatttttcagctttttgcaaagctcaaggaattcgtcccacgtccatggattctcaaccgttggcagcgttttcaagtcaacgccggcgtccttcagcatttttttgttatagtaaataccgaccgatgattcgctgacaccgatcgcatacagtttcccctggtaggttccctgttgcttaatgctcggcaataaatcatcctggtctttgatatactcatccaatggcgcaataacgccggatttcgcataagccgccgtgttcggtccgtccaaagtgatcacatccggcagggtattcgttgtcagcgccgcgttcactttgtcttcatatccgccgccgtttccgcttctggggatgaaatcaattttggcctcgatgttttcagaggcatactttttattaaaagcgtccacccgcttttgatagacctttccttcttcactgtcatcagatacgtgcacccacatcgtaagcgttttcccatcttggctatttgcacttttgctattgctgcagccccacatcgcaaacatcagcaacaacgaaaaaattccgaagagccaccttttcatctttgtcacttccccccattttttatcaattaacaaatgaaagcactttcaagtgaattgtatgtcaaccggtttcatatgtcaaccggttgacatattttttccccaattattcatcccggtacatttctcagaatcatggcattttcttgcacatatcggcccgattctctaaaataagtgcgtgacgagaattgtaagccatttcagtaaaaatagcagggggaaaagggaatgaagcctagcattcacgacgttgcaaaaaaagcgggagtttcaccaacaaccgtatcgcgggtattaaataaccgcggctatattagtgaaaaaacaaaagaaaaagtctataaagcgatggaagaaatcaattactttccaaacgatttggcccgctctttatttcgtaaacgaactcatttaatagggctcatcatccctaactccagcaacccgtttttcggcgaactggcctttcatattgagagcatctgcgctgccatgggctacaaactgctgctttgcaacagcttaaaccgcaaagacaaagaagaaaaatacttggaaatgctgatgcgaaatcaagtggacggcgtcatcgccgtgacttacaacaggggaattttaaattatcatcggcaaaacctgccgattgtcgccatcgaccattacttgtcggaaacgattcccgtcatcggctctgataactatgacggaggaagaaaagcgacagaactgttaattgcaaaaggctgccggcacatcatccatatcaacggaccaattgagctgaaaacaccggcaaatcttagaagaaaagcatatgaagatgtgatgcgacaacacgggagacagccgattacatatgaagttccctttcatcaaaattaccgggaaatcatttcaaaactgtttgatgaacagcctgcagctgacggcatttttgccagtgatgacctcatggccgctacagtcatcaccgaagcaaaaaaacgcagaaaagacattcccgggcaattaaaggtgatcggctacgacggaacggaagcggttcagtccattctcccggaattgacaaccatccagcagccgatcgaactcatttccaagacggccattgagattttgtccaaagccattgaaggcgaattcgatgatttgccgctggaaacctatttgcccgtacagcttttagaaggagagacgacttaaaataacgggacaaaaaaaggagacattgacgtctcctttctccatacatatcctgatctatccaattataaaaaagataaaatttacattgctcacctaaaatttaacttatatttctagacaaactcacctccccatgataaatttaaagacaagttttcgaaaaattctaattttggcgtggaggtgcctttaattgaacgtaagccacttttttcctgaaacctttgtttctcttgtaaaagacatgttaaccaaaaccgatggttcaacaaccaaagcgattgaaacgctgatcggcggcaaagccgaaatcgaagtttttcagcaaaataatattgattatgacaagctttcacctgaggaagcaaggctgtttcaacgcgatgatgacatcttgtttagaacctcgtctttgaaaacaggcgatgattatttatcttataattatgtctatgtcaaaacaaacttactgccgcccgccatcaaacaagatttgcaggaagaaaggcttcccatcgggaaaatcattgcagaactggagtcaaggcgtgaaattttcagcacgggcgactgcctgggaaaacatttcacacaacttgtacctgtttcagcagaccggacatatgcttttaaaaaataccagatcatcagcggccgacagtgcatgttctatgtctgcgaactgtttgatttagaaaaaatctgcaaactgactgcgggctgaatcatgcccgtcagctgccgctttatgaaagagcttccaaaacctcctccttccttcttccctcataataaaaacccctgagaaacaggggctgttatttattgatacaccgttttcggaactgcaacgaccggatttccggcggcataaggggcgacatcgtattgttggaagacgatcgcaatgccgtcgttagtgtaatagaaggccgtgtttttaccgaggacgatgtctttcttcttcacatccggaaagaaaatgtcgctgtgtttttgaatatagttgtaaatgtatgtttttgtcttatccattttcgattttgtatttaggatgtcggataaatacacccgttttttagagacaaggtcatagttgaaagagcggactgccgtatttccgtgcgctccgccggaatagacgtaattgcttgtcaggatgctcagcttttggccggtccggtatttcacttcaaaggacgtttgataatccgtttggtatccgtgctgttggccgtctttcttgttttttacataatctttgtaggactgctcaatataatgtttaaaatctttgttgatcttgttttggagagatttggggcttacatttgaaacttgcgggtatttcaaagccttaatgtttttgtacgtatggctcgtgaccgtcggttttttttcgtttgccgcgtgtgcagaaggaagtgcggccgcactgtacagcgcaaaaaacaatacccctgtcatcaacattccgaacgctttaaacactgtttttttgttcataaaaaccctccttaatctgtcattttttataatacccattttgaaatcaggtacacattatagaccggtgaactcaataaaaagtttctgtttttggaaataaaaattgaaaaaaattctaatttattctgtttgttcagcatcttgttgactgtttgaacggctgtcctgacgaaaaattcacacattgattcgatacgccctccagtttaaccgcagaagaagaaaatgaaaaaaacgaagagtttttttaaacccattgacatttttataaaaagtattaatattaaaactattaaaaaatcgcataaaaaggttttccttatcaagagtggtggagggactggccctgtgaaacccggcaaccgctgtctatgacagaatggtgctaaatccttaagagcatgttcgtgctcttgaagataaggaggagattgaatatatcaagctcttccttatcgggaagagcttttttatgtctataaagaaagagggatgaagcatgacacaatcaaccgatgtactgaagcaaacgcctggaagaaaaatcggaccgtacagagctgatcaggtgggcagtcttttaaggtctgagcccgtaaaaaaagcgcgcctccaaaaagcgaacggcgaaattagcgctgaacaattgcgcgaagtcgaaaacgaagagatcaagcgcattgtcgaaaagcaaaaagaaatcggtcttaaagccgtgacagacggggaattccgcaggtcatggtggcatttcgattttcttgaaggacttgacggcgtagaaggatatacagcggacaagggcattcaatttcataatgttgaaacgaagccgcgcggcatcaaagtaacaagcaaagtcgactttacaaaccatccgatgctggaagattataaatttcttcatgatattgcgggcacacatacgccgaaaatgacgattccgagcccgaatatgctgtttttcagaggaaagcttggagaaagcccgtatgaggatcttgatgaatttcatcacgatgtagctcaggcttacaaaaaagcgatccgcgcattttacgatgccggctgccgctatttgcagctggatgacacggcctggtccgtatttttctcagacaaaggacatgagcagatcaaagctttcggccgccagcctgatgaactgcgccagtctttcgccaacacgattaatgaagcagttgaagggcgcccggacgatttgacggtcaccatgcacatctgccgcggcaacttccagtcgacatgggtggcggaaggcggctacgatgcggctgctgaaacgattttcgacggactcaatttagacggacttttccttgaatttgatgacgagcgctccggcggcttcgaaccgcttcgctacgtccaacggaaagacttgcaaatcgtcctcggtttaattacatctaaattcggcgagcttgaaaacccggatgatattaagcggcgcattgaagaggcgtcccgatatgccgatctgaaccagctgtgcttgagcccgcagtgcggctttgcttcaacggaagagggcaacctgcttaccgaagaacagcagtgggaaaaactgcgccatgtcgtcgagatcgctgaagacgtatggaaataacacctcatatttgagacatgcctcctgacggcatgtctctttttttgcccctctatacaatttaaaattccttcttgatttgttcatagtttgatcatatttggcttctataatgctctttagtgaggtgatcgaacaatgattaagaaaaggaaaatcgatatattcctggtcttcattcttgtattatctgcagcattaaacttgtacggcatctggaatagtgacacagacaacgcctactatacggcggccgttgaaagtatgacccaaagctttcataacttcttttacgcatcatttgatccggcaggctttgtaacagttgataaaccgcctgtcgcactctggattcagacactttttgcacttgtattcggcgtgcacggctggagcgtcgttctccctgaagccattgcggaagtgatttccgtagcactcttgtactttattgtaaaacctacttttggcaaaacggcggccagaatttcagctcttattatggcgtgtacgccgattgccgttgcggtcagccatacaaacaacgtcgacagcattctcgtcctttgcttgatgattgcaacgtggctgttgtttaaagcagtccggaaaggaaaaatcggctggctgctcggcgcattctgtatgatcggtgtcggttttaacgtcaaaatgctgcaagcttacatggtattaccggcattcctgctgttttacatgattggagccaaaacgacgattcgcaaaaaagttgtgtctcttatcacagccgtgatcgttctggcaggtgtttccgtttcctgggcggttgtcgtcgacagccagcccgagatttcgcgcccttatatcggaagcagccagaccaactctgtccttgagctggcgtttggctataacggcatccagcgtctcacaggtcaaaacggtgcaggcgggggcggaacctcctcatctgatcatgatcaaaagaatcagcagcaaagcggcgatattgaaaacaactcagactcggcaaatggacaaatggctccgccgagcggaggcgaaatgccttcgggcggaccggatggccggcagggtgatgtccaaagcggcggcggaggtcccggtggcggcacaggcggcatgtttggcactggaaccccgggtcctctcagactattccaatctgagctttcaggacaggctagctggctgatcccgtttgtcctcttcggcatcatcggtttgctgatcgcgggtcttcgcagacaaagaaaattcaatgaaacaacgactgaaacaattttctggatgatgtggcttctgccggtcgctgcattcttcagcatcgcaggattcttccatcattactatctgattatgctggcagctccaatcgccgctttgtcaggtgcaggctggacggcgctcgttcgcctctatcaggaagaaagcggctggaaaaaacggctgctgccaatcggcattttgctgacaaccgcatttgaattgtatattttgagtccttatctcagcgaaatcggcttcatctggagcatattgatcggcgctttcggcattgtcacaagctgtcttctcatctttctcaagaaaggaaagtcattcagctactatgtatcacttgcagcgctgcttggcatgctgatcgggcctttctattggacaacggcgacgcttgctgacggtgtaaacggcatgattccacaggccggacctaaatccgcacaatcatttgccggcggtggcggaggaggtaagatgcagaataacgacggcagcggacctcccggatttggcagccaagacggccaaacagacagtaatcaaaacaacaataatggccctggcttcggtccaggttcaaacagccaaaacagcaacgattcttcagctgataccggttccggccaaaacagccaaaatcagaatgacgaaggcgcaagcggccgtcaacaaggcagaccaagcggcggcggcagccctggaagcggcgagtcggtcgatgaagaactgttgagctaccttgaaaagaacaacaccggtgaaaaatatttatttgcagtctcaagtgcaacttctgctcaatcttacatcatcaaaacgggcaaagctgtgatggcgatgggcggattctcaggaagcgacccgattttgacggttgaaaaacttgagaagctcgtcaaaaacggcgaagtcaagtacttcatgatcggcgacggccgaggccgggacaattcagaaatcaccaactggattaaagaaaacggcacagaaatttcaaaaagcgaatacagcagctcttcttctgatgattcacagtcaggcggacctggcggaaatcaaacgctttataaagtggagctggattgatgaaaggaaaggtgatgaatatgcagaaacaagtcacattttcaatcgtagtccctgtctacaacgaagcggaagtgcttcaaagcacctatgaccgattaaaaaccgtcatggactcgacaggcgatccctatgaactgatttttgtaaacgatggttcaagcgatgacagcattcacacgctgaagtcgcttgctcagtcagaccaggcagtaaaatgcatcaatttctcaagaaacttcggtcatcagatcgcgattacggccggcacagactatgctgccggcgaggcgatcgttgtgatcgacgccgatttgcaggatcctcctgaattgattttggaaatggcggaaaaatggcgccaaggctttgacgttgtatacgccgtccgcacaaagcgagaaggagaaacatttttcaaaaagcaaacggccgccatgttctaccggattttaagaaaacttacagacgttgatatcccggtggatacaggagacttccggctcatggaccggaaggtggtcaatgaaatgaacaagctgaaagaaaaaaacccgttcgtccgcggtcttgtcagctggctcgggttcaagcagacagccgtctattacgagcgccacgaacggcttgcaggggaaacgaagtacccgctgaaaaaaatgctgaagctctcgctcgacggcatcacttcattttcctttcagccgctgaaactggcaagctactcaggaatcgtgctgtcagcgatcggctttatatacgccttcatcgtcgtctgcatgaagctgtttacgacaagcaccattacaggatggtcgtcgatgatcattctgcaatgcttgttcagcggatttatcctgatcatcctcggggcaatcggcgaatacatcggccgcatttatgacgaagtgaaagacaggccgctttatatcattgacggaaaatacgggtttgaagaacagcggcgggcgcgagctccccagcgccatattatgtagaaagatccaaaaggagggattccgatgagcgtactagttgtcgggggagccggttatatcggttcccacgccgtttacacgttaattgagaaaaaagaaagagtcgttgttgtggattccctggcaacaggacacgcagaagccgttcactccgaagctgcgttttataaaggggacattcgcgaccggcattttctcaagcaagtatttgaaaacgaggacattgaagccgtcatgcatttcgcagcatctccgatttcctcgaaatccaaaaacgtgtttacttcctttaacgaaaacatcacaggaatggaaacactgcttgacgtgatgaaagaatacgatgtcggccggatcgttttcgcgtcaagcgcggccgtctacggcagtccagaagacctccctgtcacggaagaaaccgaacctgagcccgttcacgcgcacggcaaagtcaaatggatgatggagaaaatgctgatggaagcggaaaaagcgtacgggctgaaatatgtgatcctccgctccttcaatgcgtgcggcgctcacccatccgccatcatcggcgaagaccgggggagcgaaacacatctcatttcaaatgttctgcgaaccgctctcggacaccttccttttgttcacatagatcaatctgaagacggaactggcgtccgcgattatgttcatgttcaagatttggcagaagcacacgtgctcgccatcaatcacttgcggaaaggcaaggatagccgaatctacaatctcagctatggcgaaagctactccgctgaacaaatcatccttgccgcccaatatgtcacaggcattcccctcatcgccgcaaagctgacagaaacggacatcgattcacaagcaacatttgccgcttcttcctccagagccagaaaagaattaggctggaccccacagcacaacagcctgatcgcgatcatccgcgacgcctggaactggcactctgcgaatccgaatggatatgcgtcggagaaggtgaagcaagggtgaaaatgaactgcacccctatcgttaggcagcgtctaactatggaggtgcgtttttttctccatcggctttgcggtagttggtgatcatcggcaggccattgaaatgtttttatttgagttccaaaaattacagaaggcttgtcccaattttgtggcctacctttgtcaaataagaaaaggactgcataaaaactcttcagtccctctatgattcaattcctaaatcaactaaataagccgttggctgttgtttgtttttttgtaaatcaataagtacattaacagaacctgctgtaccaattgtcttcccatgataagaaatatacaaaactacataatctttattaaaataatgaatattagctatcctcgcatcacccgcgtttaaatccatctcttttgcaatttgtttgaaatcaatcttaaattgagcttcatatttttcatttccttttagataattatccattgtttgtatctgttggataccatcaggcattacatttgtttctttttcttttgctccgttaatataaacatacttaccgtctttgctcagaatatcagtgtttttgattttcctaactttgtttttcttttcatcaaaaatgtatttatcaaataacttacgatatgctccatccttcgctacatttggaaatacggataagtattccttcagtttcccagactcaattgttgaatttaattcctcttctttaacaatccggtattttgaaagatcactttttaaaaaaagataatatatttgtctgtctccaaggtcaccatttttaaatttttcatatacgtccacttgtataagcatgctgtctttgctaacagctgctaacgccagatgtacttttttatccttggctgatggaaactctatttttttttctccgctttttgttttcacttttagaacattctttttatctaatgtcatttccggcagattatattcaagtttattgtggataagtttttctttagttaaaaattcagttgttttcaaatcatataattttgtcgcaggatatttattagccgaaagaaagggactgtaaaaatcgtctacttcttgatctgtatattgatagtaccgtagcccctttttatcactgcgcataatcgtatatgtactattttgataactaagagttgcgtctgtcgctaaatcaagttcatgtctcataaattctctaaatgctggactgtcttctttgggcaagccttttttatagatggcttcctgaacatcatctttgccgcagccggtggtggcgagcagtagaaacactattaaaaaaaatatacttataaaccctttctttttcatcgaccttctcctattctgcttcttttttgttgacctctcgaatcaagtcaacaaattcagagtcttcaatttcataaatatgtccaggattggttacaccggaacctcttacttcaatttctggctttttatcaatgagatcgcctaatatgtcaccgtgttgactttcgaccgaaacgatatcatcactgtttattttatgttttccgcttgcggtatagtaaggggaaaaacttacagtatcctctgttctgtatcccgccgcagcggtaatgtccatcttctgcagcttttgatacacctcaggattggcagatttcaaatgattaatatcttcagtcatcgcctcacagtccatatcagtgtaggcattactgtaatcttttccattatcattgtttttgttttcttcattaaaatctaaataatcacttgtattcatagtatctcttccagcagcattatctgcaagccagcgcgctctatttgccccggcagctaagagatttttatcatatggagttccgattgttgtgatgcttcgcacatggtcagggtaatccatcgcaaattgcagcgatcttcttcctccatagctgtgcccgaacatatcgatctttgtctcctcattcatcagccccatctcatttaacttttctgctaaatcgtcacttgttgcttgccgatgctcattgggttcatttgtgtcataaacaatatggagacggccgttagtgtcgaagtattcaagaccttttatttcttcataagtttcctttatatacatttttccatatttgtcaatataatagtattcataaacatattcgtttttttcatttgttgtaatacgaacgataaggtcgccctttttcgcagcatcctttacacttttatagaaaccattcccactatcctcaatcccatgcacataaacagaaacattcttataatccgaaaaatcgccttttacatggttaactgaattatacaagattgagaggtctgtcaaagcttcgcgcatcggggcgcggtgggtgcgggcgacattgctgaaatcttgttccacctgatcaatgccattttttagattctcgtattggctaattaaaagaacagcgtcactcgaaatattgttgcgttttcttaagtcttccggtgtggggtcttccatagactcaaatttgcgcctggcattctcctggcactcttttaaatcctttatccaatcgttgatttccgatttgatatccgccacattaaaatccattacgttttttgatacaaaattcggaagttctttattttctatcgaaacccatattttattaaaagtatcaagcagacggctggattgggctaaccgcagcagctggttcgcttttctttcatggtttttgagaatgttcgtgatttctttttctctattatgataagccataactctgtttcccttccatcatttcactctttgcagttgctgtgagattatgttatcgacgcgctttaattccttaacgatgtttttagcatttgccgaaagttctttgactctttttttaagctccgtcatgattgagttgatgtgcgactttgcatcagaccagacgtcatcgaatttttcccacggaaattctgtttcatacatcatttctctgagcattgtgtcaaaatggtgcaaaacttcatcaagtgtagatagatttgattcaaactttccggttgcctggtgtaacgattcaccgtttactttaatttcactttgaactctttcagccgaaaacgtatggtttctttctgatctcgactgcggctgaacattggccggcttgtcggattcgtccgtcagttcgaccgcttttgcaaaacagcgtacactgtctgcaaaatataataaacagctgcttgctttactgaaaaagttgatgttgtcgctcatttttttctgcagcgctgctgcggcttttccgctgtgccggtctaattcttcacgaaaaaacaccatgttctcaaatacatggataaaggcgttttccagctgactaatggttcccgctgccttgtgtgaaagttctttgttgaagcgaaaatgtcccatcgtcattgctccttattttctttttttcctgcttcagcttctgttagcagttcatcaagctgcaattctttttgatcaacatacccgtaatggtataccacttctatgtcctgtttattaaatagaacaagctgctcttttggatcggtaaatccatttggatagtcgacagctgcataatctctgatcacgtgatttgtttcagaaaacatttgccggccgatgacgagcagacgccttgaatcattatataagccgacaacactgccgacaggaagatagttcttttttaacagcataattcattatccctctttttctctgaaattggacatacatacaagttgtaaaaacataggaaaatcatagcaaaaaggtatcatttcattcaacgaactaaagcaccgcgaaattttgcctatttaaattcagagacttttgatttaatgttcgctcattacgcaaggtttgtcggtgtcattagtatgttacagtgaggccttagcactgaaacgattcatcatacttacgggaacttccagataaagtttctcaaaaaaaccgccataataggcggcatcatgaagatataaagcgcgatcgcttacgattctcctctaataaaaagaattttatcactttcaatttttcgtctgttgttctgtgcatcgtcacttcaatcatttttcccgcttgaaaatccggctttcaaagactaagcaacaagcgccctgaccctctcctagacatgacttcatttgaaatgtgaaaatatatttttagcttgaattttacacaatctcgagataaaatacagtcaaaataatagaagcccacttcttgtatataatcagtaatagggtctgattgtttctacctggcaaccgtaaatcgccagactacaaggaagtttgaatagatttgatcatgtaaaaagtgtattgcgcaaacaatatatctatttttcatttgctcttatttttcatgctttctttatcggaacccatgaaaaataagagcttttttattttcaaaaaacattcgggagttggcatcatgtattttctcattaatattttaggcattttcattgtcatgtctgtaatttatttttgttccccgcgaaagaaaagcgtaaaatggaggccgattctctcccttttcatcgttgagcttttggtgacgtggtttatgcttgggacaaaaatcggcggatgggccatcaacctgatcgcctctttcttttcgtggctgatcgcttgtgcaagcgacggcatcgcttttgcctttccgtccgtgatgggcaatgaaaccgttgactttttcttcagcgccttgctgccgattatttttgttgtgacattttttgatatactggcttatttcggaattttaacatggatgattgataagatcggctgggtaatttcgaaagtctcacgccttcctaaattagaaagtttcttttcgattcaaatgatgtttctgggcaatactgaagcgctcgccgtcattcgcgggcaattggctgtattaaaggataaccgcctgctgacgttcggcattatgagcatgagcagcatcagcggatcgattctcggttcttatttaacgatggttcctgcgacatacgtatttaccgccatcccgctaaactgcttaaatgcgttgatcttggccagcattttaaacccggtggaagtcactaaggatgaagacattatttacgtaccgccaaaagaagagaaaaaggactttttctcaacgatttcaaacagcatgatggtcggaatgaatatggtcatcgtcattctcgccatggtcatcggatatgtcgctttaacctcatgtttgaacggtattttgggcttgatcgtagacggtttgacgattcaaaagatcttttcttatatcttcagtccgttcgcattcctgcttggactggcgccgggcgacgcgatgtatgttgcacagctgatgggcatgaaactcgccacaaacgaattcgtcgcgatgatggatttaaaaacgcagctagacgcgatttcaccccatacagccgccgtggccacaacatttttgacgtcgtttgccaacttcagtacgatcgggatgatctatggaacgtacaattccttatttaacggagaaaaatcggcgattatcggaagaaatgtgtggaagctcctcgtcagcggaatagcagtgtcgctgttgagcgcggggattgtcgggctgtttgtttggtagaaaaatagattaaaagggcaggcatctagcctgcctgctttattattaaacttgcctatcccaatggcggtgcccgctgatcgcttcgaccagctttttgccgaagtcgtctttgttcttatcaccacgagaggtgataatgcccggctgtgaagccgcgtgggccccggcggcggacagcaggagatcgaccccttcgcctgcggctccgaccgctttataatgtccgaatgcttcattgacaaaatccgatgcggctttatgcaatttcaggcgttctatgctttcttggccgcccggaatataaacggcatcgtacagcacagaatcgaccgtctgcaaagtgtttccgacttcaatttctgtgccgccggccccttcgattactccgagtgccgagctgacgatgtccggaatgatgccggcttttttgaattctttcaacacacggctcaagtcttcatcatcaaaaccttgttctgctaaaatggcgactgtccttgtctgcggcagtttcaccgtattctcctggctgagcgcaggggatttgaacgtcacgttggagccttcgtctttttcagggggctctacgcctacacccgcagcgatttgcttggcaagctccccgtcaacccggttaaacatatgaacgacttggcggcggacgtccttgcttttgacctttccgacttcaaagcggaacgccgaaatgatatgttctttttcaacgggggacatgctgttccaaaacagcttcgcttgcgaatagtggtcgttaaagctttcgctgcgctggcggatttttttgccctcgactttttcctcgtagtgcacatatccgccttcttcttctgaagcaggcgccggatcgttgttttgaagcgaatttttatgataagcgacaggccctttgttaatcgtcatcctgtgatagccgtcatactggttgttatggaacggacagaccgggcggttgattggaatttcgtgaaagttcggacctcccaatcggatcagctgtgtgtccgtataagaaaagagccggccttgcaatagcggatcgtttgtgaaatcgatccccggcacaacatggcccggatggaaagcggcctgttcggtttccgcaaaaacgttatcctggtttcgattcagcgtcattttgccgatgattttgacagggacgatttcttccggccaaagctttgtcgggtcaaggatatcgaagtcaaacttgaactcgtcttcttcgtcaatcatttgcacgccgagctcatactccacttcatcgcctctttcgatcgcttcccacagatcgcggcggtgatagtcgggatcttttccggcgattgtctgcgcttcgtcccagacgagcgaatggacgccgaggacgggcttccagtgaaatttaacaaagtgcgccttgccttcttcgtttacaaacctgaacgtatgaacgccgaagccttccatcatcctgtagcttcgcggaatcgccctgtcagacattgctcacatgatcatgtgggccgtttcttcattgttggcgacaaagtcccaaaacgtatcgtgcgccgtagaagcctgcggcatttcgttgttcggttccggtttaaaggcgtgcaccaggtcagggaacttgatggcatcctgaatgaagaaaacggggatgttgttgccgacaagatcatagttcccttcttctgtataaaactttgtcgcaaatcctctgacatcgcgtacagtgtcacccgagcccctggaaccggcgacagtcgagaacctgacaaacaccggtgttttcactgacggatcttgaagaaactttgctttcgtatactccgtcatcggctcgtaaacctgaaaatagccatgcgcgccaaaccccctcgcatgaacgactcgctccggaatccgttcatggtcaaaatgggtcattttttcacggaaatgaaagtcctccatcagcgtcggaccgcgcacgcctgcttttaaggagtgctcgtcttcagatacgcgcaaaccttggttcgtcgtcatttttttgcccctgttgtcagaccggtactgttcgagttgttgatccttgctgtgcccattgactttgcggcggccatcattgttattcacttgtcatccctcctcatttttattccctatgtagctgatctggaatgctattttatgatttaccctttctgtcggcgggttaaactctttttatagattcaaagttttgtgtgacaactacacaaaaaaacgaattaaaccgattttaagggcacacatatttcgcaatacggactgttcaccatatcaccaacgtatttttccatgattggcctattgtccaattggtatttgttttgcagagatgagaaaatatctgaatatgctttttgaatagcttctgctgtatgttcaacctcgtaaataaggtattgtccgccggaaatttcgccttcaaaaacggtatcatcgacttgataatcatgcggtatcacaatacaagcatcaaatcgacaatgatcaggaggcgttgttttcgggttatcttgtggaatcgcaaacagaatggcggattcaagaagatcttttttcttagcccatttttttaatctttccattacctcaatgttggcggggccgtatggaccaactcggcgcatatatgcaatgcggtagtttggaagtgtttcgattttgaatttcataggttctttcttcctttccatcattgttgttcgttccgtttcgaatgtaacacgctttaaagatatttacattcatatttttaaaattttctgcaaattttaaaatgagcattttcaaaccaaaaaagaggatattcagagatcatctgaacatcctctttctttgtttaatcgagtgtttcgccgtttgtagcaatcaggtttttataccagtaaaagctttttttgcgaatgcggcgcaagtctttcaaatcaaattcatcgcggttcacataaataaatccgtagcgttttgaacagccttgatgggtcgaaattaagtcgatggcagaccatggggagtagccgaaaacatcgactccatccgtgattgccagctgaatttgcttgatatgctcttttaaataatcgatgcggtaatcgtcatttacgacatctccgtcttcaagctgatcaaacgcgccgaggccgttctcagtgacgatcagcggcagctggtagcggtcgtaaatttcgcgcagcgtcgaacggaaaccgacagggtcgatctcccagccaaatgcgtttttctttaggtgcggattgctgcttcccctatatacgccttcttctcccgtctgcaaatgctggtctccgcctcgagcagccgtgtcgctgccatcacccctgcttgcttcagccgtttgcgatgtatagtagttaaacgcgataaaatccggcttggccgaccgcagaatgtccatatccccttcagcgatgaccggtgtgcagcctttttctttcatatatgcccacgctgttgtattgtaccgtccgaatacggccatatccaagtaaagccagtttcggatcgcattatagttaaaagccgccagcacgtcctccggtttcgaagaagcgggatagatgagcgcaatattcggcgcaggaccgatttttgcttccggcagcatctcatggcaaagcttgatcgctttcgcctgtgcgacgagcatgtgatggttttgctgataaagctcttttttcggattttccaagttcggatcgagtgtaccgagtgcagatccgtggaggatcatcatattttgctcattgatggtcagccagtatttgacgcggtcaccgtagctttcaaaaaggaccttcgcatacttttcaaaagcatcaatcgtggccctgtccgaccagccgccttttttctgcaaagcattcggcagatcaaagtggtacatcgtaacaattggttcgattccatactttagaagttcatcgatcaaacggctgtaaaattcgattcccttcggattaatatcaccgtccccgtccggaatgatgcgcgtccaggcaatcgaaaaacggtacgctttgaagcccatttccgcaaataaagcgatatcttctttatagcgctggtaatggtcgcttgcgactttaaaatcggttgtcccttccgggtagctttcgcgcgcatcgatgacagaaggcccttttccatcttcgtcccaagcgccttccacttgataagcggaagtagacgcgccccacaaaaaatctttcggaaattgagctaatgttttatatttcatgattattttcctcccttggtgatgaaattaaagtgatgatccgttcttcagttttcacctttttttgatccgttggaatgacatccgtgtattgaccggaatttgtaacgatgatcggcgttttcacgtcaaacccttcttctttcaaagcgtccagatcgaattctgcgagtatatcaccccgtttcacattttgcccctgcacggctttaggattgaagtgctttccttcgagcctgactgtgtccattccaatatgaatcaaaatctcggctccgctttcggtcgttatgccgtatgcgtgacccgtcggaaatgccgttgtcacgatgccgtccgcaggggcggtgacaacgccttttgacggaaccaccgcgattccctctccaagcgcccccgatgcgaacactttatctgatacttctgttaacggcaggacttctccttgcaaagggctgtaaatcggttcaccggcgcttttttcaacaggctcctcttttgtcacctccacagggtcgtcaaagccgacaatgtaagtgagcaaaatcgataaaacaaatgaaactgaaatgccgatgatgaagccgagaaagcccggtccgtaaaaaatcggaatcgtcaacaagcccggagcgccggaagcgagggcgacgctgccggagtatccgataatggctccgcctgccgccgcgctgatgacaccgcatacaaacggctttttcagcctgagcgtcaccccgtagacggccggctctgtaatcccgaatatcccggtaacggcagctgatcctgccaatgctttcagcttcttgtttttcgtcttcagcatgacgccaaatgcggctcctgtttgggcaaacacggcggctgccgtcgccggcttaatgtagtccttgccgtggacggcaatgttgttcaaaatgacagggacgatcccccagtgaatcccgaagatgacaaggatttgccataaggccgcaataatcgctcctgccagaatcgggctgaaatcaaaaacggacagaatcgccgccgcgatcccgtttcctgtgtaaacgccgagcggtccgaatacgatcaaagttaacggcaccatcaccgtcaggcataataaaggggtgataaagttcttcacgctttcatgaataaagcgcatacataatctttcaagatagctcatcacaaataccgcaaggataatcgggataacggtcgacgtataattcatcaagacgaccggaatgccgaaaaactccgtatgggcgccgctgtttttcagttcgagtatcgtcggatagatcagcgctccggcaatcgtcagcgctatgaacgggttcgctccgaattttttggcggccgtaacggcgagcagcaaaggcaggaaataaaacaggctgtcggctgccgcgtatagaatcgtatatgtcgtctcttccggcgagagccagccggcgtttgtgcaaatcaaaagcaggccttttaaaatccccgctcccgccatgacgccgagcagcggagtgaaaatgctggatacgacatctactaatctaccggcgaggcttcctttctctttttgactgtgatcggccgcagaactttccaacagttgagagatccggccgatttctttatatacttcaggaacgttattgccgataacgacttgaaattgcccgccgctctccaccacggttaccacgccatccgtattttcaagcgcttctctgtctgctttggaacggtctttcagtttgaagcggagccttgtcgcgcaatggactagcgatacaacgttcttctccccgccgacgcgcgccagaatttcttttgccattgattgaacattcatcgttgatcatctcctgtctctcgtaaagccctatcaagctgttaaaaaataaaaaacctaaactaaagcctgtacaaagaaggcttagtttaggttttgcctgccgaacagtaacaatcccacttaagacaatatgaaaataaaaaaacctaaatcactatgaaaaacaagggcataagagtcccccttcacagtcatttaggttttgcctgcatcatcagtaacaatcctaacaacctgtataagttgatgtaagtaaaaagtagcatacatttatccaattgtcaacgctttcatttgatatcatcctctatttttgatgaacgactcgctcgatatgaatcgtcaaatacagaagctcttcgtttgtcagctgatgaccgtattctttttcgatatactgcctgattttatttgtacaaacataagcgtcccggtacttatttttgacggtttcaaataaaaagtcgtcccggctttccatataggttccgctgaacagccgctgggcgaaaaatttcaaatgggtaatgaagcggtaatagtgaagcgattcttcgtcaaattcgatatgaaagtgatacttgacgatgcttaaaatctcctgcatgactttcgtaatattgacgatgttcggcatttcttcattcagctcggcgtttacgatatggagcgcgataaaggcggcttcatcctccggaagagctgtccccgtcttcttttcaatgatggccagcgcctctttgccgatggcgaactcatctttatacagccgtttcgtctcccaaagcagggcatttttaatatccagtccctttttatgccgttcgacggcgaaatgaatatggtcggtcagcgagacataaatgctgtcattcagctttttgccgagctttaatttcgcataggagataatttcttcagacatttccataaattcaattggaatttcgtccaacagcgtcttaaacctttctgatacatctttattatcaagcctgaaaatcttctcgattctcgattcatccaccgcttcgccaggctttttttgaaaagcgattcccctgcccatgaccactaattcctgaccctgttcatttaaaacactgatcacattgttgttgatcactttggcaattttcacatcgcgccactcccatcttttaaggggatttttttatacttcttttttcaaatggtacacattgattgtacaacctttttggcctaggtcaatatatttcagtcaacgtccgaaatgtttgcattttacagaatgcccgcctgtacccgggtttataaaaaaagagccgcaaggcggccctgtaaaaaaccttcttaaaaagtgagcaaaatccccgctgcgactgatgccagacccgcaaaatatacgaagtcttttccggaaagccccgctgtttgatagtaggtgcggtcttttgtaccggtaaaccctctcgcttccatggcaacggcgattctttccgatttgcggatgccttgcgaaaacaacggcagcgcatagcgaataaacgccttccagctgtttttttgcttatagcccctgattttgtgcgccgccttcatttgcgaaagctccgactgaaaaagcgggacaaaacggaagccggccagcaagccataagcccatttaggcgacaatctgcattgatgaatcaggctcataataaactgcgtcaaatcggttgttgacgtaaacaagagaccgtatgtgacaaagccgagcatccgcagcgcgattgtcagcccattgccgacgctttcctcggtaacgcggaaccaggcccattcccaaatcgtttcctcgcctttcccaaaagcggccatcatccaaaatacgagaataaaaaaaataagataaggcagcagccgtttacttaaataagacaaagtccatcccccgaaaaaaatcccgatgacaaccgcaaacagccaaatgaaaaaagtcggtttcggatttgaaacaaacatgagaatgcacatgaccaggaggtgggaaaagagcttggcgctcgggttcaatgccgaaagaagtgaaccattgcttttcatacgggaaccctctcctttctttcgtgcatgaaccggtagtgaagcggcggtatcaatgaaaagcggcggaccaggtcttggtcagagaacaattgatacggcgttccttgatatgccgctttcccttgatgaaatacgatgacccggtcggagtgctcgtctacgatgtccatgtcatgcgtcaccatcacaatcgtcgttccccgttcctgccgctcctttaagcgcttgatcaattcttttgccgtcttttcgtcctgaccgaatgtcggctcgtcaagcagcagcaaatcctggtcaaacaaaagcatcgtcgcaacgcttaaacgccgtttctgcccaaggcttaatgtaaagggatgcgctttttgatgaccatcaagtccgaattcctgcagcaattcagccgttttcctttcgacctgctcctccggccagctccgctgtctcgctccgaacgcgatctcgtcaaacaccgtgtcccgaataaattgaagctcggggttttgaaagacaaagccggccttctcgtaaagcgtacgatcggaccatttcttcagctcccggccctccagataaatgcgcccttttttgaccgcttcaagcctgatcagactttttaaaaacgtactctttccgctgccgttcccgccgatgacggaaatccattcccctcttggaatctccaggttgatgccgtcggcaacgatctttttccgatagccgatcgccgcgtcctctgtgcggatcaatatgtccctgtctgctgacggcctgtttttcgcttcctcctctttcattttcaatgtagaagagagcttgacggcgagcggatgatcatcttgtgtggtaacatcttcccatactgcggggtacagtttgggctgccagatgcctgccgctttcatttccggctgaaaatgtttgacgatttcttccggctttccatcagcgatgatctgtcccttttcattgaaaaggatgactcggtccatccactcgatacagccgtccagcacgtgttcgacgaacaccatcgtctgtccgctttttcgggaaacgtcgcggagcaaggcaaagatgtcttgccggctggccgggtccagctgcgccgtcggctcatcaaaaaacagcacttcaggctccaaagcgagcaggcacgctaatgccagcctctgcttcataccgcctgacaaggtttcgatcggcgttttcttatctatctttaaaccgaccagctccatcagctccgagatgatgcggtccatatcttttggcggaacggatcgattttcaaggctaaacgcgatttcctcatcaacatgaagcatgcaaaactgcgaatccggatcctgaaacataacgccggcgctctttctgcggttgacctcgcctgtgacttcagcttcgatatgttcaggaatgatgccggaaagcacggacaacagcgtcgattttccgcttccgctcggcccgagtatcagcactttttctccctgctcaatcgacagcgagacccggtccaagactgtttcaggacgatgataaaaacggacggaaaggttactgcatccgagaaatgaacgcatcggcatcatccttcttccggtgttctttcatgatctcatactggttcaggactcccgttttcgcaagcgcttcgacaacggcttttgccagccagccgccgagtacaatgccgctgatgatttggatgataagcgtcaatatcagcgtttgcgtcgtatagtaggcaaaaccgtttgccatcaggctgtatgtcgcgctccccaccgcggctagcgcaccggaaagcataagggtaaacaagttatagcgcttatagcgaaagatcgcaaacgcgatttccgcaccggctccctggaacacaccgattaataatgctgaaagcccaaaatggcttccggtcagcagttcgaccgccgcagctgccgtctcggcaatcagcgccgcacccggtttacggatgatataagcgacaatcgggctggcgatcacccatatgccgaacataaagttcgctccgacgggcccgacgatagctgaaacagggatccacaaggtagaccaccctaaataaatgacgccgcatgccacagacaagatgactgtcatgacgacttctttcatgttccaattcatcgtctcaccgcccccatttccacaggccaatcttcaaccgtataagccatctcccaaaagccgtattcaagctgacagctttgcaaaaagagctccttcattttttctttttcagccttgcccgctgtttcggcccattcatccaggcgggcgcaaaactttgtcgtgattgaatccgttctgtttccgtaaaaacagatccagtcataaaatggatgcgatggatcaggctgaacgtccttcatcagtttttttccgatctcccaatatgtccatggacaaggcagcaagacggctaatatctctcccagcgtaccttcgtgcgccgccgtcagcatatggcggacataatgatgggcggaaggcgcaagcggatagccctgcagagtttcgtactccaccccagcggcccggcacaggtttttgtgcgggtgcacttcgctgtctagcacaaatgaaatctgctcatgaaacatttccatatcttttcgattttgacacttggaaatcgcaattccgtagatttgaataaaggcattcaaatactcgtaatcttgctttacataatgaataagctgctccttttccagcctcccggacgccagccccagtacaaacggatgctcaaaaatggcttcaaaaatagggtctgcctcgcggcgaagttctgcggaaaaactcatgtagatagcctccttagcaatcggttttataggaaggcacaggggggcaagcggctttatacgcaaaaaagccgccccaaaatggagcggccttagtatgatgaaatcattaagacaccggctccacttccctacgctagtatgaactagatcaggttcaaagggtccaagatcgcttcttgtctcagccggcttacggctcccctagtggacttcctattacattaacttttactctacacatcaatggttatgatgtcaacctgagtttttcagttttattcttgtatagaaccgccgggtttcatacagaaagtcggcaatcggaaatatttgtagaaaaatataaattttctgaaaccttttccgggcttgttcgtcttatatagtgaagacaaaaaatttggaggggatatttatgatgatgtttatcttgattttgacaatggccgtgtatttgttctattctttcagcaaagacaaccggccggccaaaacaaacaacaggaatcatcagacactgactgttattagggaaaactcttttaccgccccttccaatgatgtcaattgctaacttgatagacaacaagcaagccgcccaatgacgggcggctttttcacgtttttatgattgaaactgttccgcttcagtcgatcccttcagtgcagtggttgatgaagtcccgcctgtcacaacctgggcgacttcatcaaagtagctcgttccgacttcgcgctgatgccttgtcgccgtatagccgtggacttcgctggcaaactcggcctgctgcagatcagagtacgccgccattccgcggtgcttatattggcgggccaattcaaacatgccgtgatttaaggcgtggaagcccgccagtgtgacaaattgaaatttatagcccatttcactgagctgtttctggaagttcaagatcgtgttgtcatccagtttggccttccagttgaacgaaggggaacagttgtaggcgagcagtttgcccgggaatttttcatggatcgcctgtgcaaaccggcgggcttcttcaatattcggctcagacgtttcacaccagatcaaatcggcatacggcgcatacgccaagcctctggcaatcgcctgatcaaggccaggctttgttttgaagaacccttccgctgttcgctctcccgtcaaaaacggtgcatcatatgaatcgacgtcgcttgtgatcaggtctgccgcattcgcgtccgtgcgggcaataagaatggtcgggactcccatcacgtctgcggcgaggcgcgcggcaatcaaattacgtaccgctgtttgcgtcggaagcagcacttttccgcccaaatgcccgcactttttctcagacgacagctggtcttcaaagtgaactcccgcggcgccggcttcaatcatacttttcatcagctcgaacacattcagctgcccgccgaagcccgcttcagcgtcggccacaatcggagcaaaccaatcgatgtcttcctttccttccatatggtggatttgatcggcgcgctgcagcgtgcggttgatttttttgacgacttccgggacgctgtttgccggataaaggctttggtcaggatacatgctccctgacatatttgcatcggcagccacctgccagccgcttaaataaatcgctttcaatccggcctttacttgctgcatggcttggtttccggtcaaagcgcccagcgccgggacgaaatcctctgtatggagaagcttccacagcttttcggcgccgcgccttgcaatcgtgtattcaatctcgagcgtgcccctcagccgaatgacgtctgccgcctcatacggccttgtgatccctttccagcgttcatcatgctcccagctttctgcgagttgtttttctttcagcatcgcacattcccccattatatattttcataagccggtatcgttagaaactccgcgaattcatcatccaaaatcagctgttcaaataactgtccggcctcttcaaaccggccgctccgaaaatgttccacgcctgcttcatcgatgattttctgcatttctttctctttcatcatcttgaccatttccgcggtgactttccggccatcgtcaagaactcctttcggatggcgaatccattgccacagctgggctctggaaatctccgccgttgcagcgtcctccattaagtggtcgatcggagcggcgcctctgcccgacagccatgaagctaaatagcggatgccggcgctgatattggtacggacgcctgcttctgtaattctgcctttcggtacttccagcaagtctttttcctcgacctttacgtctttccgctttctatgaatctggttcgccgacggcatatgctgattgaatacatcgagcgccgtttgaatcatgccgggatgcgcgatccatgttccgtcatggccgtcttttacttcacgttccttatcttcgcggattttggcaaatgcggcttcattgatctcaggtttgtctttagcgggaatttgcgccgccattcccccaatcgcatggacgttgcgtttatgacacgtttgaatcgccaagagggagtaggctctcatgttgggaactgtcatcgtcacggctgagcgatctggaagaatgacttcatccctgttcctgaatttcttaataaagctgaaaatataatcccacctgccgcagttaagcccggctgaatgttccttcaattcgtagaggatttcatccatttcaaaggccgccaggatcgtttcaacgagaaccgtcgctttaatcgtgccctgcggaatgcgcaagtcgttttgcgcataaacaaatacgtcgttccacagccttgcttccaggtggttttcgatttttggaaggtagaaataagggccgcttccttttttgatcagctcttttgcgttatggaaaaaataaagaccaaaatcgaacaggcttgctgacacgggcctgccgccgatcagcacatgcttttcttccaagtgccatcccctcggcctgaccatgataacggcggggttctctttcagctcatagcgtttgccctgttcattcgtaaaagaaatcgtcccgcggaccgcatcccgcaaattaacctggccttcaatgcagtttttccacgtcggcgagttcgcatcttcaaagtcggccataaagactttcgctcctgaatttaaagcgttgatgaccatttttctgtcgaccgggccagtgatttcaaccctgcggtcctccaaatcccgggggagcggcgcgactgtccagtccgcctcgcggatgtgcttcgtttccgccaaaaaacaagggttcttcccttgatcaatttcagcctgcctgatcgtccgcaaatgcagcaattcccgtcttcttcccccgaaatggcgttcaagacgtccgataaactccatcgcttcttttgtcaaaatctcttcataatgcggatttatcgatccggttatatgaattctcttctcctctgttttcatgtctccctacccctttacatgctttgttataaaacagtttgcctactcgccttttttggcaagacagcgctcgcattccatgaagtaagattcagcctgctcctccatcttttcgccgcattcagggcacgtttttttcggaagcgttctgaaaaattccatcggacttttcaagctcatttgtataacctcctttttatagaacagttttatgttttatatttctgttgtagtacagtatacagcgcaaaaatgaaaatgtacacacctttttccaaaaaatatttatttttttccattcaaacaaaaatagattgttctctttttattcatagcttgttcatatttttcttctagaatagggaacataaagaggtgaaagtgatgatgaaaataaaaaacaaacaacttgatgtcattctggttctaattttgttggcagctcttattctgaatacatataacatttggctggacgatgccgccaaccagtattacttggcagcagtcaaaagcatgacgcaaagcttccacaatttcttcttcgcgtcattcgactcttccggattcgtatcagtagataaaccgcctgtcgttttatggattcagactatatttgcgaaaatcttcggcgtgcatacgtggagtgtgattttgccgcaggcgcttgcaggggcgggttccatctatctgctttacgcactgataaagccgaaattcggaaaaggcgccgcccgcatttcagcgctggtgatggcgctgacgccgatcgcggtcgccgtaagccgaacgaataatatcgacagcatgctcgtcttcacgctcctacttggtacatggtgcctgatgaaggcggtcaaacaaggcaggctgatctggcttctcgctgcattcggtctcatcggcctcggattcaatatgaagatgtttcaggcattcatggtgcttcccgcgttcttgctgttttatctcattgcggcccatgcgaattggaagaaaaaaatcgtttcagcggttttatcgcttattgtcctcaccggcatttcgctttcttgggcgcttgcggtcgactatacatcagccgacagccgcccgtatgtcggaagcagccaaaccaactctgtgcttgaactggctttcggctacaacggcactgagcggcttctcggccagacgacgggcaacgcccgcggcgatatgaacggctttggaggagacatgcagcagccgaacggcaatgcgcaagctcagaacggaaaccgttcgtccggcggctccaatggacaaaacggcgcgatgcagccgccgggtgcgggcggttcggcagacggcagttctcaaggggcaaacggcggcagccagcagccagccggaggcggaccgggcggaggcaacggcggtcccggaggcaatggcggcccaggcggaggtcaaggcggcggacaaagcatgaacatgttcggcaccggtgacgcaggaccgctgaggctcttccaatcggctttatcgggccaaatcagctggatgctcccatttgcattattaggactgctcggcacgatcatcacctggtttcgcggccgccgcgaaaaagcaggcgaaatgaaagaaacgatcttttggtctgcatggctcgttcctgtcgccgggttcttcagcatcgccggattcttccaccactactacttgattatgatggcgccgccgatcgccgctctgtcaggaatcggatggtacgcgatgtacggcctttacaacaatcataaagactgggcaagctatctgctgccggcagccgttctcacgacagcagcattccaagtgtacattttaagcgcttatacaaaccaaatcggcagcgcttggatgtatgtcatgggaatcctggggctgggtgtcaccatcgccttactaatgctgaagcgacgccatccattcggaaagcagctcaccatcatcagcttgtgcgtgcttcttttgacaccggtctattggtcggcaacaccgatcctttacggagggaacagcgttcttcctgaatcagggcctcagctgcaaagctccaacggaggcggaatgttcagctcggacgtggacacaggactgctcacatacctccgggaaaataataccggcgaagagtaccttttcgcgacattgacaacggtaaccgcagccacgtatatcatcaatgccgacgaaaatgtcatggcgctcggaggcttcaacggcacagacccgatcctgtcggtcagtgaactgaaaaacctcatcaaaaaaggaagagtaaaatacttcctgattagtgaaaactcaggcaacagcgagctcgtctcctggatcaaagaaaacggaaccgaaatttcgtctgaccaatacagcagtacagacagcttcgcacagcagggtgcaagaggcggcccaggcggcggacagcggcaaacgctctacaaggttgagctgtagaaaatgaggaagcccatcggatgagtccgatgggcttttgattatgcttttctgaaaataaccggcggatgatgttcaatatggtaaaggagtttttctccatatagggtcatcgttttcattcaagcgacgcgagattccacatgactcagctacagcgccgacttgatcactttcttgccgtaaagaacggaaagcaagccgaaaatagagtacaggacggtgtacagcaccatcacgatgatcatcggcgtccacagctctgccccgaataggaaccagccggactggacggcgaagtagctgtgagacaggccgataactaatggaatgccgaagttgtagatttgtttgattcgtatccccttcaacagatcgttccgtgtgaaaccgagttttctcaaaatcgtgtaattcggtttctcatcttcgctttcgtccatttgtttaaaatataggatgcatcctgaagtgatcagaaacgttagtcctaaaaagcctacaataaacatggcaaggccgaaaagcgatttttgagctgtgcttgcatcaaggagcgataaatgctgatcgttttgattcactgttgcaaacagctcatttgcctgctgaagctgatcttcatgttttaaattgattccgtaaaaaaggctcggcttctgctgcagctttggatctttgtcttggctaagacgtttaaacagcgcatcatctacaacggcaacaggcaatccgccgctggtaaagttgaaggataaaagagactcttttttcaagcctaaatagtttaatgggattgtctcatgcctgctctttaccttaacggcaccggtctcttttaaagccataaatttctggagaaggtcggtatatcctgaaaaaatgacgtctccttttggcacgtccatcccggcaatctctgcatcgctgaccacggcgaggggcaatttccccgggtctccagccatattttcaggatctccatcgacaatttgttccagattaaaaaccgcttgaatgacatgaatttcttttttgctgtaggaaatgttattttcgtccaaaagttgttcaaaacgctttgcatccttttgatttgtcatggcgaaatcagccgccacgttttgttcggcggttttctctgcagaatagtacgaaatatagctcaaggataacaatccgatcgccagcgccgaaacggtggtaatgattgttaataatagggcgtttgatttcatccggaacatgatcgatgaaagggacagcacttcataaatattcaagtagcctcctttgcttttgcggatgatgttggagacaaagctgaccgatcctttatagaagaggtacgttccgatgatgacggttccgagaataaagctcatcgcataaaacagctcatctacggtcttgaattttccgctgaaaagctcagtggatacatagtatccggataaaataaacaagatgcccaataagccgatgatcatttggaaaacggatattctctttaccttatcctccgtagctgatgtcactttaaataaagataaaatgctctgctttttgataaacgcataattcatcaccattacgagaaggtagatgccgcagaatacaatgacggtttgcacaagcgcttcgacggaaaaattcaatttggcttcggcttgaacatctacaattttaaacaaaatcatgagcacgagctttgagatcgaaaacccggcaaacaccccaatgaccaaagagccgaaatacagcatgacattttccaagcttaagatgcggaagattttttgcttcctcatgccgattaattggaataaaccgatttctttgcttcgtcttttgataaatatcgtattggcatacaaaacaaacaccgctactactgccacaaggagaatggaagctgccttcaaagccgctgcgccttttatcgatgccttcacttcattgatcgctggatcatactggagcgtaacaaacgcaaaataaagcgctgcgctgaagatcaacgcaaacacataaaggtaatagttccgtatattttttttcaggttgcggatgatcagctgattaatgctcatgctgaaccccgcctaacacgccttgcgtcttcatgatgtcctggaagaacatctgcctgtcctgtccgcctttattcagctgcgtataaatttgtccgtctttaatgaaaaccactctactgcagaagctcgcggcgacgggatcatgggtaaccataacgattgtggcccggcgcttttgatttaattggctcagcttgtttaacaagtctgatgcggatttcgaatcaagcgcaccggtcggttcgtcagcgaaaataatgctcggctcatgaataaacgccctggctgctgatgtgcgctgtttttgccccccggaaatttcattcggatatttatccttcagctcgaagatgcctaattctttcgcgacttcctcaaacttttgaccggcttctttttttgatattttcgtaatcgacagcggcagaaggatattttctttcactgtcagcgtatcgagcaaattgtattcttggaagataaatcctaaatgctgcttcctgaactcggcaagctgtttttccttcatattcgtcatctcagcttggttgatgttaatcgttccgccgctcacctggtcaatagaggacagaacattgagcaatgttgttttgcctgaaccagacgggcccataatactgacaaattcccccttttgaatctgaaggtcgattccctttaacacttcgtgtttattgtgcttatttccatagctttttcgtatttttttcgcttctaaaatcatcattttaaaatctcctttttactggatatttttattatagaaaggaaggcagccgttttccttcgattaagcgaacaaaaaagaaaagcgtgtgacatttttgtcacacgcccagcacacgggaaaattcattccgcattggaaaaatcagcgtaaaggttgtacccgttcccggtttagaatcaacctcgatatgaatcaggagcggctttgccgctttttttgccaagtacagccccattcccgtggcggcctgatcatgatgctccgttgttgatgtaaagcctttgtcaaacacgcgcggcatatcttttggatcgatgccccgtccaaagtcttgaacagcgagatgcactttgccatcctgctcatagcttttaatcaaaacatcggatgcttcgctgtatttcaccgcgtttgtcagcagctgcctaatgataaaagacagccacttcgcatcgctgagcacttcccccgcctccagctgtatatcaaacccgatcccttttggaatgcaccatgattgcaaatcttttatttctttaaagatcataggtttaagctctaggacttcaagggacaagtcattttcgataaatgacatccgcttttgatggagctggcggtcgagcagcaggtggatgcgcagccattcgtacgcaagcctcgcttttaaagattgatcctcaatcgtctccatgatcaaatgcatggcggtaagcggcgttttgacttcatgtatccaggccatgagctcatctttttcattctccaatgccaggcgatgctgtgccgcctcttgctttaactgtttcgtttgttcggctatgcttttttcaatcatcgtttcaaaaggggtttccgcctctcgaatgtttgtcacatcgagattgtggtcccattcttcaagacttttataaaacttcgtttccttccgaaagcggacaattacaaaaacgataaaaataaacgaggacaaataggtcatatacaaaatcgacgtaaaaggaatggatgcatcgacataagcgataaacagaaagaggatctgctgcaaaacaaatatggcgatccagcttcgcctctcggtcaaaaacgctttcagcattctcatcatccttcttctttcgccatatagccctggccgaccttcgtctcgatatattgccccaagttcaaggcatcgagtttttttcttaagcggtttacgttgactgtcagcgtgttatcgctgacaaagcgttcatcgttccataggcttctcatcaattcttccctgctgacaattttgtttttttggtcgatcaattgttttaaaatgaacatttcattccttgtcagttcgatcgcccccgccttattgctgacgcggttttgttcgggatcaacggttgcaccgcaccacgtttttttaagaatctcaggctctgtattatagtcgtagacgcgacggaaaatcgcctggatcttggcaatcagcacgtcaaaatgaaacggcttctgaatataatcatccgctccgaactgcatggacatgaccatatcagcaggatgatcgcgcgaagataaaaagagaatcggaacgttggaacgggagcggatctgccggcaccaatgaaacccgtcatatttaggcagctgaatatcgatgatgacgcagtctggcttaatcgccgcaaactcctgcatcacttcgctgaaatcgttgatgccgtatacctcgtatgaccacccggttaaccgctcttttatttcttgaaacagcgattcatcatcttctatcaacagcagtttaaacatttgcctcaccgcgcttttttctattttctaaatcaagtgtatagcaaattgttttcacgcgctacagagaaaaaaaagggccgtcctgtaaaggacagccattctgtatatcacaaactctcgccattcgtttcgattactttcttataccagtaaaagcttttctttctcgttcttgaaagcgtgccttttccttcattgtcacgatcgacgtaaatatagccgtagcgctttttcatttcggcggtggatgcgctgaccaggtcgatcgggccccatgatgtgtagccgattaagtcgacgccgtctgcaatggcttctcttacttcttttaaatgatcgcgtaaatagttgattctgtagtcatcctggatggagccgtcttcttcgacgacatcgacggcgccgagcccgttttcaacaatgaaaagcggcttttgatagcggtcgtacaatgtattcagcgtaatgcggatccctttaggatcgatctgccagccccattcggacgattcaaggtacggatttttgacgccgccgagcaggttgccttccgtttttgccaagtcttccggactcgtgcttgcgaccattgacatgtagtagctgaaaccgatatagtcgacggtgttttcctttaagatgtcttcatcaccttcagccatttcaatcgtaattccgttttccttaaagaagcgcttcatatagcccggataagccccgcgcgcctgtacatccgagaaaaacagcgttcttctctcattctccatcgcagcgagcacgtcttccggctttggcgtcatcgggtatgtcgtcgttgcggcgatcatgcagccgattttagcgtccggaatgatgtcgtgccccgctttaacggcaagagcgcttgcgacaaatagatgatgcgccgcttggtacatcgcatttaacttgttttcgccttcttcaaacacaaggcctccgcctgtaaacggcgcatgcagaaccatgttgatttcattgaatgtcatccagtattttactttttctttatagcgggtgaaaaccgttttcgcataatgctcatagcaatcgatcactttccggtttttccagccgccgtattttttaatcagaccgagcggcatttcgtagtgggaaatcgtcaccactggctcaatattgtattttaatagctcgtcaaagaggcgatcataaaattcgagtccctcttcattcggttcagtttcatcgccgttaggaaaaatccgcgtccaggcaatcgatgtccggaatgctttaaatcccatttcggcgaaaagagcgatatcttctttgtagcggtggtaaaaatcgatgccttcatgatacaggttcaatgactccatcgactcatcgaatggatacatgacgccgttcggcgacacatcggctgtcgagagtcctttcccgccgacattataggcgccttccacttggtttgcggcaaccgctccgccccataaaaaaccttcaggaaactttttcgtttgttcagtcatatcatttcacctcatccaaatttgtcaggctttcctctttctacgccagcgcgatcagcgcttcctcaatgtcaacgctttcatctgatttcaaaggtttgatcgactggtaccggtccgtatttgtgatgataaccggcgtgatcaactgatagcctgcatccttaatcgcatccatatcaaatgagacaagctcgtctcccggttttacagcgtcgcctttattgacatgcacggtaaagtgctcgccgttcaatttcaccgtgtcgattccgatatggataataatttccgccccattgtcgcttgtaatgccgagggcgtgcttcgtttgaaaaacggttgtgatcgtgcctgataccggcgacaccactttgccttcttcaggctcaatggcgacgccttttcccatgacttctccagaaaatgtcgcatcatccacttcactcaatgctttgacttcgcctttcagcgggctttgaatgatctctcccgcgcccgcttcagatggagcggctccttgttcagcggcttcatctgaaggaatgtcttcaaaccccaatacaaaagcaaacgccgttgcggcaaagaacgcgatgacgataccgatcattgcctgtataaaagtcgggccgataaacgtcgtaattcccggcaaaccgacgtttccgccaataatatatgctgctacgccggtgatgccgtaaaatgctcctccgacagcggcgccgagaagcgcggatacaaacggctttttcagcctcatgttgacaccgtacatcgccggctctgtaatccccatcaaagccgtgatgcttgtcgtcagcgacaatgatttgaatttcttatttctggatcgcaggaagacggcaaatgacgcgccagcctgccccatattcgccaagaacatcgcaggtatcaagtaatcgtagccgttttgcgtaatgttgttgaacataaccggaatgaaagcatagtgcattcctgtcatgacgatcagcgagaacgttcctgctaaaaggatcatcgtgattaaaccggcattttcaaataaaccgttcacaccgattgacagatagttccctgcaatcgcaccgagcggaccgaccgtaattaatgtgacaggcacgacaaccagcagcgtcagcgtcggtacaaaaatcatcttcaacgaagtcggggtgactttgtcaatccatttctcaacgtaagatgcaatccaaatcgcgagcaggatcggaatgacggtcgacgaataagtggcagcggttacaggcaatccgacaaaggaaatgcttttccctgaaccgagaagcgctgtcagatcgggatgcagaatcgccgctccgatcgccgccgcaacataaggattactgccgaattttctcgcggcactgaccgccagcaaaatcggcaggaagtaaaatgctccgtcgccgatggcggataaaatggtgtggacctggctagtttcgctcatccagccgaacgtgacggcgattgcaatgatccccttgatcatacccgctccggcgatcgccgggagaatcggcgtaaatacgcctgatatcacatcaaaaatggcggacagcacgtttttctttttgccagcttgctgctcgcccgctttttcatcgctgagcccgctgttggcaatgatcgctttatacaccttagggacatcatttccaatgatgatttgaaactgctggccgctgatgttggtgcccattacagccggaagactttccagtttcgcgcggtctgccttcgcattgtcataaagattgaaacgcagtcttgtcatgcagtgaatcacgctctgtacgttctcttcaccgcccacgagttgtaaaatgtccttcgatactttattataatccatatgagtacctcctctttgggggaatctgccggactgaaggtggccgccttcacccggctttttttattggcctgctgccgaaagaatcctcgaaatctcacatcacctccttattttgggtataaaaaaaacctaaattacgccggcttaaacgggacaatgccccagaaagctgtacgcaacttaggttttgcctgcaaaagcagtaacaatccttaagaaacttgctgatattagtttgtaactatactttagcacccgtttttgttcatgtcaacgctttcattacaaatgtctcataaaaaatagaatacatgaaaactaaaaactaagactttataccttcatttcttcgttttctagctttcgccgcctttttcataagcaatgcagggtttcgccttgctttccttcgcgccgccggctctacaactgcttctttcggttcctgctgcttatgaagaatgaatccggcagccataaacggaatccctgataagttcgtgaaaatgtttttaatgcccatcgctaaaataaaagatccccatggagaaaacggatcttttttgatttttacgtaagcggcgatttccaaggcaataaaaatgatcgactgtgctaatatcactatcagcaagcccaaaatgaacaagaggcccaaattaaataatgtgcctgagtagagcatcaatttcagcgcagctacgaaagttccagcctccatatatccgtccgtgacatttggattccaaacagcataagcgtcaagctgatgtttgaaatgaaaaaacaaaaataaaatgaacaaccaatatatgctatgtaaactgatgcctaataaaatgagtctgtctgctgctttgttttgcaatgttgctccttctttcgtttatgattgaagagaatgaaccgtctcttcctgctttggctgaaacgcctttaattcgttgctgtccaggtcttcctgtaataagcaaaccttttgaatctgcctgttttgataatggtgaaaatagtagctgcacgtctcgctgcacattaccgccgtatattgggtgtaatcgtcttcgccttgatcagtcataacaacccctttaggaatattcatattggagaggacatgaaacgcggcagagacgccttctgtttcatcggacacaggcttcatgtgctctttcaaaaatgcagccctgacaaagcgggatggcggcgtaaaatctcctggcaatccggacagcccggaaccttgaccaaaagccgacagcgtcaggcctcccatttttttcgcggcaaactgtcccggctgaagaccgataaagttgcgcaaattggtcaaatgccaagggaaatccggactgttcgtcagcacgccgaccggattatcatgaatttgaatgccgtctgccgtcggttcaacaacgacgcttgccccggagcggtccgttaatagccaatgcagcggcgtcaccgtactcagcaagctgacctctctctcaacaatgtttaaggaaacagccgcttttttcacatcctccaaatcgccgcattccgacagcacccatgtcacgaattcgtgcggcgcaagattgcggctttgctcttttgcttcgttttcatacacagcatagcccgggaaataaagcgccgcgcaagacaatcctttttcattcacaccatcggcaaacagagcattcttgagccttctgcccatcccgatatacgcataccggccggcatgctcgctgccgtccgcttcacttttccatttgtagcgacgcggatgcaacagcacctccccgttaagctcaaaatcaaaatccatcgtcctcgccaataaatgctcccggcccgcagtcgtcaacgtgatacttgtacacattgcgcttcatcctttttgtttgatattacacttcgtgaactatttttatgttatcgaattggaaaagattcgtcaaaatgaaaggggttatagaaaaaagccggggttttcatcccggcacataaattcattcaacaatttttcttttttctttaaatttagtataatcatcaactatactttttaaaagtcgatctatagctgtaaataccgtaaggattaagaacatgatatagtcattagcagaatcagcaacctctaaccctattacaattttaaaatcggaaaaactttttgaaatggttataatcaacaataacaggtacccaataatccttctaatattttgttcttccgtattgaaagttgaaaagtaaatccaacttgctaacgttagaggtagggtcaataaaaataaataaaaaatactataaggtatactgttaacttcggttaaaaaagttaaaattaaaattaaaaataaacaatgaaaatacagactcattcctgtttttccaaaaaacacttttaatctatcaaaaatataactatttctattcactttagagatagtattttcaattaaactctcgtattctttttgatttttttctaattcttttttaatatttaaattaaaatcccctataaagatagtacaaaaaagaaagaaagctagtaatccaaaaaataaaaaattgagaagagagttgcttggtgataaaacacaaaataaacttacggcaataaagataatcattaataaaataaaaaagtactcactagctctcaatgtctttttataaattaataaggtatttttttgttcaacaaactttctaaactttttaaagctctccttactcatgtatttgatagaaggaaatataaatttatcaagaacaaagttagatccaaactttactatacatgcaataataattaataaaataagactcatttcatctacctcgtatcaaaattaaaggtgtataccttctacaggttggagacccttagtctttttaaaatccaaactagtttcaaagagttgaagagtatcaattggtttaatgtaattaatatttaaagccatgaactgctcttttttaaatttaacgccaaagatagtcattgttttctcatgtccatccactgtatcaattcttttttctaaaacattaatcgatacagtctcaacaggaattatttgaaagattacttttgctaaacctatagaaagactggcaataaagtttaattggttttgataatattttgttttggttagctttttagttaacaagttcccagcagaagagatgtattcttcttgattcggtaaaattgatgtgtccactaatagattcaataaaacttcactattttcattcgaaataatctcttttatttttcctatagtatcttcaatcttaataatatcttctaaaatttcactataagcaacactgtttttgtcatcaataattttcacaaatttttgttgctttacccactcatcatattctttcttatatttagtttctgcatcagtaatttctttatttaacttttcaatttttgttttatctaatctaagaattctctcaaagaaattgggtttataattatttaaatcactttttaattgagctacattaatctctggcggtgactcttttttaatttcttcccaatttatttgcctgctcgttaatctcgtatgaaatgaagttaaatgattgaggtaagcattaagctctaaattatttgaataattgttattattcaagtgactttgtttttgtgatgaagaaatagatttactggaactataagatagacctgtaccggggatttttgaacttgttgttactttgccagaagtattataagttatcctgccatttttgccccctaaagtcatcccaacactttttttatttatattaagtttgacaccaggcattattttaaaactccttttaaaacccattttatcaacaccccttgttgatttttcttcatagaatctcacgaacaacttatgtagtaaaaaagaccatatatgtattatcgtataatccatcctgaatttccatattaaaacaaccatttgatctaaatcatttaaaaagcacatacctttaatcaggaatgtgcttttagagatgaaattccttttaaaattccgctctttttaaactactcccccaaaccgcatctccctcacgagacaacgcactaaacgtcatcaccttacgctcagaagccgcatcccactgacgcaaaaacacgccatcgtaggtttttccgtcgatcttgagttctattttgttatgccccgtgttcttccacgttccggctactgcgcctgttattttgccattttgattcaagcggatttctttcgattctttaatatctgcggagatgtctttgccatgacgcaccaattcgtaggcgccaatcacatctgatgttttcaccttttcgagcttttctccggcatagcggtgaggggcggcaacctgccagccttgtttgttcatcaacagttggtggacgcggacttcgtgctcctcgccccttcccgggaagcgggtgtggaagattaaatatgatttaccgcttttttcatcgtaaaaggcagagttatggcccggcgacacatagccgtttttattgttaaatgagaaatttcccatcagtttgacgccgtactgttcgattgaacgatcgtcaaaaagcgttccttctttgccgcggacgtcaatcatcgcgtggccttctgcatcataataagggccgtcagggtttttggagcgggcgacgcgaatgttgtacccgccgtcagcggcaagccccccgaaggacatgtacaggtagtaatactgtgtttcaggatggtagagaatatatgcgccttcaatacggctgtggttgccgccgatcagctttttgccgtatccctgtcccggaagcggaaatccggttttcttgtccatttctaaaataaaaattccgccggaataggagccgtacaccatccacagctttccgttttgatcaaagaatgtgtggggatcgacgacatttgggtgctttgtcgcgtcataaggcgtcccgtcattgctgatcccatccattcccgacttcagaaaaatgcctttatttttgtatggaccttcaatgtcgtctgcgacagcaagcccgagggcggatctcggagaatccccgcggcaggcgttgtaatacatataaaacttgccgtcctcaagctgggtgacatcaggcgcccacaacgtatcagattcagcccattcaaaggtttcttttaattcttcatagacgttcggaatcagaggattgccgtcgtggacactcgaggaaatttgcgtccaattcatcaggtccgtcgatttggccgaagctaaatgggagccgaacacatagtacgtgccattcgctttaataatcgatggatcatgtaccgtcacttctgaaaaaacaggtttttgagtttgtgcagaggcttggtttggcgcgaaacatgcagccatgatgaaaagcaatgcaaggacttggatgaaacactttctcatattcatttgttctcctctcttttaaaacgctttcattttttgacaatccatcatatgctgcttatccaaggtttattacgagcaaaaaagctcccgacaaaatcggcagcctaagattatttcctcgctttatgcactttcagcaatttccctttcacggtcgtgtttttcatcgcatctaagacgagcggacctttgccgtttaaaatttcaacgaatgaaccttgctcctggatcgtgataatcccgatatcctcggcggagacgccgtcaattttagcaatcgttccgacgaaatcaacggctctcagcttcttcttttttcccccgttaaagtagagcctcatgatttccttatttaacgattcgctcttgtcctttttgagatccggcttcgcattgattttctttagaaaagccgcttttgctcgtgcaatttcttcttttgacggcgcttcaataataggaatgggaaaaccgatatagtcttcaatgtcagcgatcatccccttttcacgcggactggcaagagtaatcgcttttccccggctgccggctcggcctgttcttccggtacgatgcacatagctttcttgatctaatggcagctcatagttgatcacatgtgtgatgttctcaatgtcgatgcctcttgccgccacatctgtcgcgattaaatagcggaacgctccccgtctgaaacggttcatcacggcaaaacgatcctcctgaggcatgccgccgtgaattttctcgcacggataacccaaaacggataggcgccgctgcaactcattcacttgctcctgtgtgcggcaaaagacgatgcagctgtccgggttttcaacaatgaacagatccactaaaagcgaaaatggatcattttcgtttacaatgatcagttgatgctcgatgtctgcggttgtcgtaccgcctgctttaatctcgattttcaaagggtctttcatatattgaagggatagatgctccacatcctccggaaaagttgctgaaaacagcatcgtcagccgttcttcaggcaaatggcggatgattgctcccacttgatcgataaatcccatattcagcatttcatcggcctcatcgatgacaaggtatttcagtttttctaatggaagggttcctttttcaatgtgatccaatacgcggcccggcggcccgacaacgatatggcatttttgcttgagctccgttttttgccgttcaaaggatgacttcccgtaaacagccgctgcttttattcttttatagcggccgatgttcgtcaaatcctccttaacctgagcggcaagctcgcgcgtcggtgtcaaaaccaaggcttgtggtttgttctcttcccattcggtcaactcgcaaagcggaattccgaacgcggccgtcttcccgctccccgtccgcgatttcacaacaacatcccgctttttaagcgccgcgggaatcacctcgctctgcaccgcagtcgggtgcttataccctaaatgatcgagcgctttcgtaatatcgccgcttaatgcatattctttaaaactggctttgctcatgtatggactccttttggtcatatgatttccagtgaatgatggtgttatgaatgtgattatacgcgaatcatgactgatttcaaaaagacatgaaaaagaggctgcaatcagtgcaaccctaagaaacaccctacagtatcaattgttttcaaaaattaatccgatcatagtaagctcccacagcaaaacagcgatgaaaatgacgcccagtagacgctgtaatacaaaagggaggcgggctaaaacgatttggacttcgtaatttaaagaggaaaccagaatggctacatatcgaaaaaagtcggtgatcagcccatttgattcgtcatatacgttgacttcatatagcttaatgattaatgttggtacaaacaaagaaacaaatgcaaacaccatgttaattgttaaatatatgataagcgcagaattgggatacggtatatcccctgacatcgcaaatccaaaaaataaactaaaaatagaaaaaacaaatatacctattgggatattggtctttcttatagctcttgaaggagggcgcgcaattgtcttttttgtttgaaaaccatataccaatgcaagtaaaatgataaacagctcagcagtgcaaacaaacataaaaaacataacattggcgtttttttcccaataaggtttattcaacaacaatagagcagttaacaatattagaataacattgcttctcagccaaaagaatcggctttttttaaaagagaacataaatagaaatcctttctactataaatcataaaattcattcattgtatccactattttcccaaaatattcgtcgactgccactggtagaagatatagcgagccagtttttttaatattttcataatctaaatgccaaatgaaattatcacttcttaataaaaaagcaacttgatctaatcttgtttgattttgaatatagtcactttctacaaaagaaatattatcgagctcttggttgtttgctaaaaagtcaaaggaaaattgacttatagtcggatgcgttttcgggtcttccgccattcttttaataacgtcagcttcaacctcgtgaaactcatcaaatgaatcttcatccatttcaaaaatttcatgttctggttttttatctgtatatgaatgataaaatgttttcaacatttctaaaaacgactctctgcttcttaaaatcgaaaaactatgattttgattttcgatctcctgcacaatgagttcatctttttgaacatggtgtacaatcagcacccttttccgatggatacaacgaacttttcgctttgattgaatgagtaagtgaatcaggttttctaaccctttttgtaaattagattctgtgccatcagcccaataccctctttgttttaaaagattttcggcttgaattgaaaatggctcaatatctttttcatcttgaatcaactgctgatcattgataatatcttcagcagctttttcatacctacacaataaaaatgcggcaacgagttcatttgttgttaatataattttagagtctaacattatactcctccttattacctgaaccagctagtgacaaattcctttgcacctgagagtccgtctgaaattgtatctgtagtttcagaggccttttgacttaaccattcaccagcttccttacctttatcttctatccaacctgcagcatcttctccccattcttttacttgatctcccgcaattatggatccagttataccaataccagctccaattgctcctccaataagggtgccaggacctggacatactaatgaacccagtccagctccgctagcggtcaacgctccaactccagcatccattccaatccctgctgaaaatcggccaaatttttcgaaccaagatttatctttattatcatcactaaaaaactcagctccatttgtagtcaaggagaatattgttccagcataaggtatttttttggcgagttttgtaatactagcttcatccttaaacttcccaacagtccctttcacatcaaccttagtcttataactcttcagttcctctggcttatgctttaggaaactttggctctccaaaattttcttgtaggagatccttgttgtgttaggccccaatccaacaatctttctcaaaaggccgcttggtttattttgaaatttgccgagccatttttttattggtttgcttgagtttggatcgccttttttcaggatgttgtaaacaaactgagccaccttggaatcgtattttccgttagctccttgcgtccatttcggagaggctttcacacggaagtttccttttccgtctttttcaagctcaagcattttcgtcgccagtacattcacggctatgacgccttttgttacggccaacgcgccgtttcctgttccgattaaatcaagccattcagcgattctgcccatcattgtcggatcgtcttgtttttctgctaaatcaacggcttcgtcaatcatttgtttaacgacatctgtttcagaaaagtagttttcaacctctttaatcgtttttttagataagatcgcgcctccctttgaccaagtgttcaccttttcagtgagcttggatagctgagcgatcgaatttgacgattgttttaatatagaattagcatcgcgatcaagctcttttaaatcagacaccgtgttgttcacatgttttttggcttcggaaatatgctcattaaatgatgccaaagagatagatccgcccccaattaagtggctgattttatcaacttcgtcattaatcgaatcaaccgtatcattcgtttgacgtttcagttctgttaagccctttttgacgtcatgcgtcagaaattcttcttttacaaaaccctctgttgattcataagttctgatttttgctttaatgtcttttaaattctgtatgtattgatctataaagtgctgaaaataaagcagcacgggaagatgaagaacagaaaagtgttctttgatcgcatttccgccttctccttttaatgcatcatcaagctctgcaattttttgtacactttcccttatggcgttgatctctttttcctcctgctttttttccttaatcaattggtcaatcgcgtcaatgacttcagaaacatctaaaactttcaagagaaaaccagccctccttatttcattttttgagagatgtttttatcagtatcaatcaagactttaatgtttgaccatgcgtccttttcaactgatgatagcgcctccttgtatttttttagtagttgctcgtattccttttcgattttttttattttgttcactacatccattgaagaattagagatatcggcttttgaacctgatatcgaaagtgcgctgatttttgtctgaaggcttgaaaacaccgttttgacttcttctgcttttacctttatttctgccattatttcacctcaatgattgacttgtttttttatatctgtaagctgttgtttttgtatacttagaaacatctccatattagaaatttgcatttcaagattttcaatctcttgctcaatatgcgaaatcagaccatctgtttctctctgtatattttgatagctgtgtgcaatgtttgatctaatattgataaattgctttgtatgtctgccattccatatatgtgatgtaatatctggctgattgatgagagtggcattgtttgaaagggtgtgaagttcaccggtaatagctgtttttgcttttttcagttcagcgattttgctttgggtatcctttatattgtgagataaagaagaaatatctttttccaaagaagagattttagcagcatggttagacatatcgggttcacctcatttttcagaaaataaaaatccgcacgttactattcgcttattccactgtatttcggttaggtatattgttgctttacgggagaatctaacgttcttgtaaatcagacctttttcatattacaatatcatccaaaataggtaaataggataatggacttggttttcttggattttcttgaatcgatcaattcaagatacaaacgatgttatttaaaatagcgtcctggacttagttcaaatgaccttttctcaaattccgtgacatcaaaaaaacagcacacacccaaaggtatgtgctgttttgcatgttcctctattccgtaatcaccgtatgcacaagcttcggtgcttcggctgtttccgcgatttggatgttgtcgtagacttttgcgatgacgtcatcgacattttcgcggtttgcgtatagggtaaccaatggttcgcctttttcgactgcgtcgccgacttttttgcggagcatgatgccgacggcgaggtcgattttgtcttcttttgttgcgcggccggcgcccagcagcatggccgcaacgccgatttgatcggcgacgatttcagacacgacgcccgcttctttggcaggaacgtcgattttataggcagcctgaggcagcttttctgggttatccgcgacagagctgtcgccgccttgattctgcaggaagtctttgaatttttgcagcgcttttccgtttttcatcacgtcgatcagtttctctcttgcttcgtcaagggtctccgcttttttggcgagaacgaccatttggctgcccaatgttaagacaagctcagtcaagtcttcaggaccttcgccttttaatgtatcaatcgcctctttcacttcaagcgcatttccgatggcaaaccccagcggctgggacatgtcggagatgacggccatcgtttggcggccgacattgtttccgatgcggaccattgcttttgcaaggttgactgcatcttcatcggttttcataaatgcgccggcgcccgttttgacgtcaaggacaatcgcatccgcccctgcggcgattttcttgctcatgatcgagctggcaatcagcgggatcgaattgaccgtgcctgtcacatcgcgaagggcgtacagttttttgtcagcaggcgtcaagtttccgctttggccgataacggcgaccttgtcgcggttgacgagctcgatgaattcatctttggaaagttccacgtgaaaccctttgatcgcttcgagcttgtcaattgttccccctgtgtgtccgaggccgcgtcccgacattttggcgacgggtacgtcgagagccgcgacaagcggtgcaagtacgagcgtcgtcgtgtcgccgacgcctcctgttgagtgtttgtcgaccttgataccttcaatcgcggaaaggtcgatcgtttcgcctgagttgaccatcgccatcgtgagatcggcccgctctctgtccgtcatgtcctgaaaatagatggccatcgccagagcgctcgcttgatagtcaggaatgctgccgtcggtgtagcctttaatgaaaaattgaatttcttctgttgtcaattcttctccattttgtttttttgtgatgatatcaaccattctcattgtgatcaccagtccttttttcaatgtttatcaatagatcaatcctacaacggtcgctgtcaagaaactgacgagcgttgcgccgtacagcaatttcaacccgaagcgcgcgacgacgtttccttgtttctcattcagtcctttaaccgcaccggcgataataccgatcgatgagaaattggcaaatgagacgaggaagacggaaacaatcgcttcggtgcggccgctgaaatggaagctgccttgtgcgagagactgcatcgcgacaaattcatttgagaccattttggttgccatgatacttccagcattcaccgcttcatgccatggaatacccatcaggaaggcaaacggcgcaaaaataaatccgagcagttcctggaatgatatacctagtgcggcgctgaaaatgccgttaatcattgcgatgatcgcgacaaatccgatcagcatggcggccacgacgacggcgactttaaagccgtccataatatattcgcccagcatttcaaagaaggattgtttttcctcttcctgtacctctaccatatcatgttctcgatcgacttcataaggattgataatcgaagcgataataaatccgccgaataagttcaatacgagcgcggtgacaacgtattcgggcttcagcatcgtcatataggcgccgacgatagacatcgagacggtcgacatcgccgaagcgcacagcgtataaagtctgtgtttaggcagcaggccaagctgcttttttaacgaaatgaatacttcagattgccccagtatcgccgaagccacggcattgtatgactccagtttgcccatcccgttgattttgctgagcgcaagaccaatatattttataataaacggaaggattctccaatattgcagaataccgattaaagcagatataaaaacaatcggtagaagtacgctgatgaagaatgtggattcattcacattcaccagtccgccaaagacaaaattcacaccttctgccgcatattcaagcaaatagccgaagcccttggcaaaaccgccgacgagatagtttccgacacccgtgttcagcaatatatatcccaatgcgaattgcagcacgatcatgacgataaccgggcggtatttcactcttttctttccgctgctgaccagccatgcaagccctaagacgacaaataaaccaatgagcccgatgagatatttcatgttttgatcctcctggtgatgtattcgcttacatttttgtatctgcgcgcaggaagcttccgcttcccgccgcactggatcttagtagttatcttcattttttccttctgctccgctgacgatggaaacgcctgcgcttgcaccgatccgggtcgcgccgtttgagatcatggtttcaacgtcctcttttgtacgaatccctccggatgctttgacaccgatgtcaggtccgacggttttccgcatcagggcgatatcttccgctgtcgctccgccggttgagaacccggttgaggttttgacaaagtcggcaccggcagcaacagccaggcggcaggcgcgctctttttcttcgtctgtcaacagacacgtttcaatgatgactttaacaagcgctttaccttttgcggcttcaacgaccgcgcggatgtcggcctcgacaaagtcatcgtttccgtcttttaaagcggcgatgttgatgaccatgtccacctctgtcgcgccttttgcgatagcgtcttttgtttcaaacgcttttgtctctgtcgtgttggcgcccagcggaaaaccgatgaccgtgcaaacgtcgatttccgttcccttcagctcttcggcggcaaattcgacccatgtcgggttgacgcagactgaagcgaattggtatgctttcgcttcttctattaatttcttaatctcggatttttgtgtatgcggtttcaatgctgtatgatcaatgagatttgcaatcgtcatttactagcacttcctttgtataagatagtttcagcataaccgatttttgaacaaatgtaaattatcatatgaaattttgttcaatagaaaataaagtaaaatccaggctgttcttcctggacacttcagtcatcaagcagttctttcgccgtgtgctgatcaataatcagcacattggcatacttgcctttgagcgcaccatgaatagcggcttttttccggctgccgcccgctacgagaatcgaccgttctttttccctcaagtcagccaattcaatgccgatcgtccgcgaatcgatagcatcgctgcaaatgtttccttccgcatcaaaaaagcgcgaacaaatatcgccgactccacgttctttcaggagggctttttcctcttcatgaaaataccccagcctgaacagcaaggcttcatcgcgtaccgtgccgactgtaaataacgcaatgtttgcctgttttcccatttctatgatccgcttgatgtgcctgtcctgttccaccatctgtttgacttccggattgtcaaacacgaccggaagcggcaaatacctcggcatcgtttgaaaagcttcggcaaacagctgaatcgtttcagacgaataagtgttgacgctggaatggctgattccgcctttcagttgaacgacctctgcgcccttcacctgtttaggctgcatattttgggcgatttggtacatcgtcgtcccccagctgacgccgacaatgtcgccgtccttgactgcgccgtgcatatattcggccccgaagcggctgagataatgcgtgatggtcgtataatccgcggtcggcgaaaagacaacatgcgcttctagaagcccgtatttttcctcaagcatcgcaccgagcgcatccatatcttcaaacgggtccataacgcggatttggacataccccttttccttggcgaactgcagcagccttgataccgtcggtcttgaaatctgcagctgttcggcgatttgctgctggctgtagtcagactgatagtagagcctcgctgcttcaatgctcaattgctgtttttccttgtccatcacgttcctcccctttagtaacgctttaacccatattatataggttcatgctccttctcatccagctgaattgcaaaatacggtccgtatgcagactcatgcgtcaccgcatatgtccatgtcatatgtttatccgttatatatgcatcttcttctcctttcagatctgcggctatcagttgttcagcatgttcaagaatataggcgtcatccgtgtgctggtagaataaaaagcaatcgcgcttcggctgttcgctaaaggcttgatcggcctgtccgccggtaaaacacggcttcatcccatagctgaataaatgccacaaaaaatggctcaccaagatcgcgtccctttccggaagctccatgcttgcggcaaaacggttttcccacgtttttctcaagtaagagccccacttcggtatttctgtcactttcacattttgtctttcaagcttgctgatgatgtacattcaggccctccgtttattttatttttccaagcgctagcacacccgctagttctcttctacatttccccttttaaaaatcaatacgaaaatcctgctattgatggaaaaacattttattattggacttacgtcctgtttttggatagtccaaaaagatcaaataaatctagcaatctccattttttcatttataataaataagtcaaaatcattactcaaaaaaacattcggggtgatctatcgtgaaagcacccgtgaggtatatatggattggtatgatcctgtgctttttatccgtcagtctggccgtcggctgtatcaaagctgaagatcagtcagatgatgagaaaaatgatgaagcgcttcagcctgccgaacacttcgtttaccgtcatttaatgagcgatcaggggctgatcaaaaccggcttttccgaccagcctgtttacttgtcggaatcgcttggcttgtggatggagtttttgatcagcaaaaaagacggcgagcatttccatgagcaatatcagcacctgaacgaatccttccttatgaacaacaacctggtgtcatggcaaatccaaaacggtcaggcaagcggggtgaacgccctgatcgatgatctcagaatcatggtgagcctcgatcaagcggcagctctatggggaaacagcgagtataaacaaaccgctcggaacatcggtgccgcattaagaaaatacaacatgaacaacgggatattgacggacttttacgactccgcctctcaatccgcggcaaaagatatcacgctttcctatatcatgccagatgcgctatccatcttgaaaaagaatggagtgataaataaagaactcgaaagtcggaatgccagcattctttatcgcgcccctttgaaaaacggttttctcccaaaagcatacagtacagaaacgaaagcatacacctatgaccatgaagtcaatctcattgatcagctttacgcagcttggcatttacctccgaaggatcaaaaagccgctgtattagcggattggctcaaacagacgtttcaaaccggcggaaaactgtatggccggtattcgctcgatacaaaaaagccggcggtccaatacgagtctccatccgtttacgcgttggcgattttattcttcatcaaccaaaacgaagataaaaccgtcattaaagcgctgtatgatcgaatgaatgattttgaaattcttgattcgtccgagacgtattatgggggatatatgagcggaaatgatacgcattcttttgataatctgctgcccctattagccgaaaggaagcttttaaatgaaaatctcattcaatgaatcgcataaaatgttcgcttatatgacaggacttgcagcagcgcttgcgttgttcatccattatatctcagtccagcggttcgaacccgttctcatcatttgcatcacacttgccatcatcgcagcaggaatatggctcggatcgatttacgcactggctgggaccatcatcgtcctgtttgttctcggcactttgatgatgttttttcacacaggccaaggagaagctgcttcgtctgaaaccggactgcaaatgctcgtcatctggggagtggcgctgttgctgttttcctttatgtcagggagaatacacgacatcgcgatcggacttcaccgctccgtcaaacaccttcaagacgaaatcaaaagctttgttgcgattgacagggtgacaggctttgataataaacagaggatgaagctggagctgtcagaagaaatcaagcgggcggagcggtatggcaactcgtttgtttttttactgcttcatatgcattatttcaaagagttcaaatccctgtacggagaaaaagaaaccgatcgtctctttcaatttgtcagcagtcaaatcagatcatgtgtccgggaaaccgataaaaagttccggcctgccgaggagcggttcggcatcctgctgacacacacgcctgccgaacatatgcccgccgtccttgaaaaactgaagaaacagctggatacgtaccagctgaaaaacggcaagtatgtcaccttgaccttccacgtgtgccacttatcatatcagaacgatttaaagactgccgatcaatttttagaagaactagaaaacgagatgatgatgaatgaactgtaagcggctattacttctatacgcggctgtgcttatcctgtctgcggctttttatgttccggacagcgccgaggcaaagcagcaggagcacggcattctcatcgtctattcaacattggatggaaaagagtcagccgatgtgaaaattctcgaccttatcgccggccatttttcatcccgtgtggccgtcataaaagacgcggatgtcaaagcatcggatctcgcaacaaaagaccgcgtcatctattacggacaaacgaaaagaaagctgagcaaaaagctcgcgcagctgatcagctcctccaaaaaacctgtgatagcgatcggctttaacgccgggcagttcagccaatttgcaggtcttacgctcaaaagcaaagacaatgtgtatcagattcgcagcacaaatgaggaaatcgattcctctttagaaagcggagtccgtgtcctcgacgtatcaggattgaagggaaaagcattgtacacatacaaagctgacgaaggaaaagctcgtccttttggatggaaaaccggcaaaggaaacgtgtacatcgggttaaccgatttgctaaacaacagcctcctcgccgctaaacagctcagacaggcatttggtgaaacggccggcagcacgctgttatatttgcggcttgaggatatcagcccgatgtcggatgaaaaactgctgctccaagccggatcttatctgcataaacggaatattccttttatcctttctgtgattccggtatatgtcaatcctgaaacaggcgacaaagtctatatgtctgaaaagccgaagctggtcaaagtactgaggaagcttcaggatatgggcggaagcgtaattgtccacgggtatacccatacataccgctacagcgaaaccggtgaaggattcgagttttgggatgccaaagccgatcagccgatcacatcggaaaatgcggaagaacccgcgacccttttgcaaaaggaacagagctttccgaatgaagaggcatatcaaaactatttgaagccgttcagaaagaatgaagaaacttacacgcggcagaagctgacgaacgctattgaggatctcaccgcggaagggctgtatccgctcgcgtttgaagcgccgcactatacgatgtcagagcacggctatcaaatcgcctcacaatatttcacaagcttgttcggccaggttcagcttagcgatacaacatggaaaacgtcaggcgccggtccatttgttacgaatccggccatgctccatgggatgacgctctatcccgagacaatcggctatgtcgatcaatcggagcaaaatccgctcggcaaagtcgaggagcgcatctctcaaatgatcgattttgaaggcggagtagccggcgcattttatcatccttatcttggaatgaaatatcttcctgaactggttgatcaaatggaacgcattccaaacagcgaatggctcgatattaaaaagacaaagcaaactgttaacacagataaagtagaaattcacacaagcggagatggaacgattcaagtcaaaagcaaagtcagccccattgagacgtttttcgatcatcaccagcaaagcccgctggaaaaggcgctttggattctctctcttattgttctcttgtttgttgtcatgtttgtgagctataccctttacttgagagccacattaaaaaaacgaatctttaaggagagaaaaagccgtgggtaatgttctgttcctagtctcgttaagcttaatatgggtcatgcttctgtatcacatgtttttgatgcagggcggattccgccactatatgaccttcgaacggaacattccgaagtggaaagagaacgtgaaggatctcccgaaggtcagcgttctgattccggcgcataacaaagaggtcgtcattcggcagacgctgaaggcgatggtcaacctctattatccgaaggaccggctggagattattgtcgtcaacgacaattcatccgaccggacgggtgacattgtggatgaatttcccacgcaatacggctttattaaaatggtcgtgaccaaaccgccgcatgccggaaagggaaaatcgtcggcgctcaactgcggttttgccgagtcaaacggggacgtcatttgtgtatatgacgccgacaacacgccggaaaaaatggctgtttattaccttgtcctcgggctcatgaatgatcagaaagccggagcggtggtgggaaaattccgcgtcatcaatgcggcgaaaacattgctcacaaaatttattaacatcgaaacgatttgttttcaatggatggcacagggcgggagatggaaatggttcaaaatcgccacgatccccggcaccaatttcgccatcagaagaagcattatcgaacagctgggcggctgggatgataaggcgctggccgaagataccgagcttacgatccgggtctacaacctcggctaccacatccgcttctttccggcggccgtcacttgggaacaggagccggaaacgtggaaagtctggtggcgtcagcggacaaggtgggctcgcggcaaccagtatgtcgtcctgaaatttttggctcagtttttcaagctgaagagaaaacggattatttttgatttgttttatttcttttttacgtattttttgtttttctttggcgtcatcatgtcaaatgcgatttttgtcatcaatttattttataatctgcatctttcattcggttttttgtctatcattttatgggttttggctttctttctatttatgacgaaggtcatgattacactgagcatcgaaaaaacagaaatgaacaggcaaaactttttcatcgtttttctgatgtactttacatactcgcaggcttggattgtgctcgtgatttattctttattcgtagaaatcaagcaccgcctgttcaagcaacatggtacaaaacagaacgatacaatcaaaagaaaagcgggtgacttttttgaaatatatcatcatatgtctggcaagcttcttgctgatcacggcgacgggacaagcggctgcagccaaagacgttacagtagacggctcgatcctgggggaaaacagccgggaacaagccaagcagcaagtgctcacaaacgatctcttgactttatacggggcaaaagacagcgccgagctgacgtatcaaataccggcgggcgcctcctctacccatcagcagcttacacttaaatacgaggcctcagaccttttaatctcaccgtcttctttaacagccgagattgatggcgaaccggtcaaaacggttaagcttgaagggaataacgggaagaaaacgctgaagctctcgctgaacaaaagccagtcgtctccagggtttcacagcttatcactgaagttctacggagtggttcatgaaggcgtctgcgtcagacaggactcctccgggaactggatcaaaatttatccggacagtcgtctgaatatcggggaaaagaacgaatctaaaggagcggcgctcgaacattatccttatccgttcgcccagtccggcagctccgtggaaaaaacggcaatcgtcattccggaccatccaagttcggctgaaatcgaagcggcagttaaaacagaagcatacctcaaaacggttgacaacagcatcagcacgaagatcttgggtgaatctgacctggcgaagatcgacaggccgacgattgtgatcggcgttcaccatcactggagcggcaaagtgaaaaagctgttgaaacaagcgaaactcgaagcaaaagaagacaagcttttgcttgcgaaacggatgctcaaagcaaaggataagcagcagcctgtattgtttgcggccgcagcatctgatgatgtgctttctgaaaaaatcagcgtcatcaccgacaaaacgtatgccgcccagctcagcggcgacacgctggcaatcggcaaacttcagcagcatagcaaacggggcggcagcaagctgacacttgaggatttcggggcgggggatttgacaatcggttcgggacagacatcttccgagcatttttattatcccgcgccagctctattagacaagaatcagcctgcaaagctttcgcttgcgatgaaaaaatcgaaaacgattcaaaagcaggccggccaaagcgacttagctgcggaacaggcggagctgaaggtcatgatcaatggccagcctcattccgtcggacttgacgatataggaaaagaagacaaaaacggcttttaccatgtttctttaaaagtcgatccgaaacttttgcaaaaaagccgttacattgatattcaatttgccgcttcaggcttgaaagagaacaacccttgctacgcggtgaacgaggacaaatggatttttatcgataaacaaagtgcattgtcttaccatgtcagcgacacgtcagcttcagcagattttcaagcgtggccgcttccctacgcgggtgatcataacaataaaacgctgatgatcctgcccgacaatgcggatcagtcgaagattgatgagctttcgcttgtagtcggctccttcggcagcgaagcccggcaggcattcacagtaaaaacatcctcggaagtcaaaccggatgacgtgaaaggaagaaacgtaatcttcatcggaagcgtcgatcaattctctctgctgaaggaaaaaacagccgaattggctgttccgacggcgaaaaacggaacatttgatgtgtcatcttttcaaatgctgaatgaaacgacaaaacaagtcgcgtttactcaaacgtcgctgtgggattcaaattactcgatggctgttttcgcgccgtttaaagggcaaggcacagcagtcacaaaagaaatgatcaactttttgaacagcaatgatttcgcagcaaccgttgtgaatgaaacggacagccatcagctatttacaaaccatcaacagctgacagcaaaatccgccgaaaccaagacggatgataaacaggaaagcaatcagcagcatgtgctgtacattgccatcctgatcgtaatcatagcggcagcggttattttgatcttgacaacggcaaggcgcagaaaaagaaaggccaatgccggcggagggattgacgaataaaacaggggcttgcttttagcccctgtttttttataagtattcaacctgtttctcatatacacccttcgcaattttagctaaaacatcgattccccttataatatcttcatccgccgcggttaggctgattcgtatacactggtgtgaatgcgccaggcgccgggattgacggtgaaagaaagatgatccgggaacgataatgactccatccgctttcatatactcatacagcgctgcatcggtcaccggcaggtcttcaaaccacagccatccgaaaagcgatccttccccttgatgcagataccatttgatgtcttcaggcatcttgcataaaagcgtttccttgagcagcatgaatttattgcggtaatatggcctgacttcattcagcgacacgtcggcgaggcgcccgtcattcaatactgatgcagccatatactgccccagccttgaagaatggatcgccgcattcgactgaaaagcttccattgcctgaatataccgggacggcccgatggcgattccgatcctttcgccaggcaggccggcttttgaaaggctcatacagtgaatgatctgctcgttgaaaatcggttccatgtcgataaagtgaatcgccggaaaaggcggagcatatgcggaatcaatgaacagcggaacattcgcttctcggcatgcgtctgaaatgaatgctacatcttctttaggcaagatgtttccgcaaggattgttcgggcgcgatagcaagacagcaccgatgcacggatcggtccgcatcctctctaaaaaccccttacggtcgagctcatatcgaaacgtatgatcatccaatttcgatatgagcggagggatcccctcaatcatctcccgctccagtgccgccccgctgtatcccgaatagtcaggcagcatcgggatcaaggcttttttcatcacagatccgcttcccattccgcaaaacgaattgatcgccagaaaaaacagctgctggcttccggctgtaatcaacacgttctcttttcgaatgccggcgctataccgctctgaaaagaagcggacaacacttgcaatcagttcatcggttccatagctcgatccgtattggccgatcaccgaagaaaacctgtcatcgtcaaggagatcggcaagagccgacttccacatggctgacacgccgggcaaaatcatcggattgcccgcacttaaattaatgtatgaccgttcaccgccggccaggacttcctgaatatcgctcatcacagccctgacccctgttttctcaatcattttctctccgattttgcttaatggcggcttcacgcttccagtctctcccgttcaaatcgaagacgggcggtttcgattttcttattgatctcgtcaatgaaatactgttccgggacgctgaatcgctcgccttcccgtcccggaggcaggtattgtctgacatagcgctccgcggcctctttgtatgccgtgtcatcctcgatttcttccagctgttcaatttcggccacaagctttcttaaatcgtccatgcagcgtggaaggtcaagcgacacgcgcttctcttctcctttttgaatggaacggccgttttcaatcatccagctgaacagaaaatagcctgtcccggaatcaaaattccgcgttgcattatgctggctcggatagcgcagcagccgctcatacaaaacaaattcgataatttcctcccagccgtcatattgccgctcccacaaggtcaggattgcttggcaatcgaccttgacttcttctaaaatgcctgcgaaaaaattcattttcgcctgaatatggagatgaaaaggtttttttccgcaatgatgaaaatagtcgtgaaggtagccccacaacacccttgcttcatatgtgcggtcgggggaaagctgagccgacttgaaaggcgcatgttcaaaaatggccctcgctcttttgagcgtgtcctcatggtaaatgtgataaaacttattaaagtagaaaatcgcgaatgtctgtgatgtgattttctcttttgttttcacattttcagggaagaatacgatgcatttttcttccgtgaacccctttgttccggcgagcagcttaagggattggcagccgttttcaggatgaggcagatcctcttctatcggcctcatcatggcaggttcttcacgaacggctaaaaaggcttcaaaatagcagcctttcgcatgaggcccattcggcgtcacgatcggcgccgcaaaaaaggtcgtctcctgatcatgcggagcccggtaagccgtcaataaccggtcaaaatacggcgtctcccctaatccgcggctgatccaatccaaaacgtcctctttaaacgcctcttttgcagccgttaagtgaaccgcttcataaatggctcctgcgtcttcaatcaattgcagcagaagctgttccgccctttcgtgatgctctgtaatctgtcctttatcattttggtacgtctgcaattcatgtatgttcggtacaatctgctcgttgaccatgtttacaatgtcccctgtcaaagtcgtcatcggcttcctccttcgattgatttaagcccgtggattgtaaagcacatcggtacttccccaaaatctttaatgactttcaaacggtgttcatcggctgctttaatcgtcgtgatgcagccgtcagccgcgtttgaagcgcaggccagggccgcttgagcattgctggtgacaaattggacttgactgctgaacagctttgccagatgagccggagcagggtgtgaagcgacgatttgaatatccgatgccatcgtgtgctgttttgcggcaaacaccatgttgtatgtaggcatcacaaaactgtctataatctttaagtccgctagattctcaaatacgatttgatgcaaaaacgggtaaacggcgcagcctaagaggactgaattttctgtcgatttaacatggagcagcgcttcttccaacgtttcataaagcctgacttccccgcggacccctttatttttgagccatagcaggccggctttttcacagttcgtgcctttgggaccgagcgtatggacaatcatcacggcttgctctttgtgcactttagtcgagatcatcttaacctcctattgtacccgtcaaattattttgataaatgatatgaagctcatcatccagctcccggtagaaagcttcacattcttcataagaatgatggcttgttaatataaaccccggataaccggaaaagtgcgggtacgggaggatctttgcgcctcttctcataaattgaaacacccgcttaacctcctgcctctgtttgacttcttccagtccgtcgattttttcaaaagtgccggagccctgtacaggaatgatataattgccggctgtccttacaggcctgatctcgccttcaaactcgctgctctccagcggctttaatgcattttgcaagacaagctgcataaagttgatgcctgtgctctctttgacgatgtaatgggaaacccctgaaccgccgattctggcgcccacctcgataacataaggtgttccatccttgtccagcctcagctctgtatgagccggcccctggtgaatgcccagcgctgaaacggcgcccgtcacttccttgacgatcgcaaggcgcgtctcttctttcaattgagccggagcaatatagaccccttcttcaaaaaacggccctttgctgttccctttgtatccaatcgaaagaacatgtacgtttccttgaatcgacagcgtttcaatcgcgaattccggcccatcgataaattgctcggctacgatgcccgttttgccgtgcacgaatcgattgaggtccctttggttgacggcctcgactttccggacggcctcctcaagctccttccgatcatcaacacggacgacgccctggcttgagaagccgttgaccggcttgacgactaatggatacgacagtttcctgttttccaggtcagcgagcgtatggaactcgtgaaaaaccggcgtattcaatccgttttgctgaagtatgctgcgggttttatttttattgcggcagttttccattgttgtgaaaggaagccccggcagattcaaagcttcagcagcttttgccgtgaaaggcaaagccggttcaaacagtgtcatcacgccgtcaaacggaaattcgacaaatgtctgcctgacgacatccatcgccgcttcttcatcttcaaacaacggcagcggcacacagcgttccacagccggaagattgcccgggaaatcttcggccgaattgtaaaagaacgtgaccttcaatcctaaacgctcagcttcttcaaaaataaatggcaggtgcttattttgacaaatgatggccaagtttttgtttcgtttcgtcaattttcgcgatcctctcttctttttttaagttgatgaacatcacaccgaatatgacaaacagcgttcctaaataaatattcgcattcagtttttcatccagaaacagaaatccgatatagagcgcaatgacaggggagatgaacaagtgggaagtcgcttttgagatgtgccattttttaagcagataaatgttgatccaaaaacccaaaatcgagccgacaaccgctaaataaagcagcgcataaagactcacaccggaaaacgttcttgtcccgctttcaaagatgaggctgctgatgagcaataccgctccgccgctcagcattgaaagggagttaaagcttaagatcggaagcgaacgaattctctgctgtactttgatttgaataaaagccgagccaaacatcgcacacaaaatcacaatcattgcgacaatttcaataacatcgactttgatcagcagttggttgccaaacacgattgtaatgccgagcaaagccaggcatatcccccatttctgcagtttcgtcgccggtgtccctttgacgaggcggttgatcatcagggcaaagactgaaatgcttgccgctaatatagacaccaacccgctcggcaaataaagagaggcccaataaacagatccgaatggaacggaaaaatacatgatgccgttcaaaaacgacagcactagcagttcctttgacagaacaaactgcctccgtgccaacagaaacgccgcgatcaaaatgcttgcgatcatgaaccgcatgccggcggaccaaaatggaaggctgtcactcagcccggctttttgaaaagcccatgtcgtcccgccgatcaaacataacacgataaataaaatatgaacccgatactttaaaacgtttgtcagcatatagcattcacctgatttagttattgtcttgctgtcatttattttcagaaaataaaatcttttctgatcaaaatggattatgagggaaattataactattatatcaattacagtcaatcatacttttgaacctttagaatatctttacaaatactgcgaacaaaaaaacactcacttcgattaagtgagtggaggcgatattggtttagcttatatttctatcttttgggtgcataccgcttttccggatgacccgaattctctcatcttatgtttaaccgtttctttgactgcgctgatccctggcgtcatataggcgcggggttcatataaatcgggattgtctttaaatatgctgcgcgttttctcagtccaggccaccatgcattcggtattaatgttgattttcgcatggcccagacggatcgttcttgcgatttgatcagccgggatgcccgaagctccatggagaacgagcggaatgtccgttacccgtgagatttcttccatttccttaaatcccaaattaggctcgccttgatattttccatgaacggagccgagcgcggctgccaaagcatcgataccggtttctttgacaatccgctcgcattcaccgatgtcggcatactgcactccgccgataagcccgtcttccatgccccctacggtgccaacctctgcttcaaccgaaacattgcggaccccggcatatgacacgacctcttttgtcatggcgatattttcatcgattggtgaatgcgagccgtcgatcatgactgagctaaaacccgcgtctatcgcttgcttgcagcgctccggacttttgccatggtcaaggtgaagcacgacgggaacggagatcgacatttcctcaatcaaagccgcaaccattgcggaaaccgttttaaatccgcccaaataatcgatgagccgatctgaagcggctgcgatgacaggtgaccgttcttcttccgctgcctctagaatcgcttttgtccattgaaggccattaatattaaattgaccgattgcataatgatgttcctttgcttcttgaagaagttctttcatggaaacgaaagccacgttcacccctcctatcccgtattaaatcttgaagtattttgaaacaacttcaactgttgtttctttggccgttcgaatcgtttcttccgcgctcagcttatagtattcaggtctgaacaattcaactgatacgacatccgaaaaaccgatgtctttcaaagttgataagtgggcatccaagtcgatggctccctgtcccggccaaacacggtcttcatctcttaaaaatccgattggaaagtcttccgtgtcatcgatatgataaatgaagattttcttgccgtccgccttttttaaatcctcaagacttgagcccattgcatggaaatggaagctgtcaaaaacaaggccgacattatcgcggttcacggtcatgacgatgtcataggcctggctgaacgtattgaccgtacactccgggtgaccgacaaactcgacagcgatctttacgccgtacggctcagcgatgtctgacagctctgtcagcacttcgacggagcttgctttaatatcttcttttaagattttttgttcggtgacaagcggtaccgcgaccacgtatttcacaccaagcattttgcacgtttccatcatgcctttaaattcttcgatgatttcacggtgccctttttcatcgcggttgttgaaaaagacaagggcattcaaggccagcggcttaatatgatgagtttgaaaatactcggctaactctgagagagcatggtcttttaagtactcaggcagcttatccatcgtccggatttcgatataatcgtatccgtgcttctcacagtattcgaggtcttttgcaaggtttgaattttccaacgtcgttgcttcattaaagcatagcttcatattcgattctccttctctcatatccttgtgaagagaagttcggcagggcgccgaactcaggggggggcttagcctaataattcttgtttcaatttttcaagcatgaatctgcttgattcatccgctctttcatcgacccaagcaaaaacggcgttcgtcgcaattccgtcgaacttcatctctctcagctttctgaagatcatatcaaaatcgacctcgccttgaccaatgtccaaatgctggtgaaccgttacttttgcgtcaggcggattgacgatgtagcgaaggccatgagccgctttatgattatacgtatctgcgaataaaacatgtgtgaggcggtcgccggcttcgtcaaacattgtctcgatgtcgcctttgccgtcatcataaaagaatgtatgcgcagtcgagtagacaagattaatccaatccttgtcaagcgcgcggatcatatccaacgcacctttgtgcgtttcgataaaatcgtatggatgggcttgaagattgagtttaatgccttctttttcaaagattggcagaagctcatccatggatttgataaatttttcttcacttgttaaaggatcgtattttgaaccgctgaattcactgttcatcaaatcgacttcaagctcgaccgcaatttcgattgcccttttccaattgcgcacggcggcctgacggcgatcttcatcaggacctgcccagtggtaaagcggaaggagcgatgaaagcttaacaccggtatctcttaaaagccgctttaattgtttgattttagctgaatcgactttcggatatttatagaatggacaaaaatcttcgcgcggcgatagttcgatatattcgtagccaagctccgccgttttatagaccgtttcttccaaagtcaaatcatcacgatacatcgatggatccaatgctaatttcatacttttcactcctcggaatgtttttattttttaacagttgtgaacgtttgatagaattccggcttctcctgaagcgccacaggttctttctgtccggattcctgagctttcacacaggcgtccgtcgtcacggcggcgatatagccgtcccacgcagtcggcccgctgacctcgcctttctgttggatcgagtcaatgaaatcttgaatttctacatcgtaagcgtctacaaagcggcgctgccaatccatgaggatatccgtcgagaatttgccgtcttttctgagagagatgcttgatggttcaggaagcttcacgattccgtcctcgccgacgatttcacactggatatcgtagccgtatttgcagttgacatagatttccgcattgatcacgactccgccttttgtttcgatgatgacgatttgcggatcacgcaaatgaggaagcgcgtttttcgattttttcggataaatgacctgaacggattcgtagtcatcattaatcagccagtgcagggcgtctatttcatggacaagcgtatcgacgacagccatatctgttgtatagttgtcgcctacaaccgggttgcggtgcgcacagtggatcatgaggggctcgccgatgacccgattgtcgatcgcttctttcagctgtacgtaaccgctgtcatagcggcgcataaagccgacttgaacgagacgtttgcccgctttgacttcttcattgacgatccgcatgcatccttccgcagtcgtcgccagaggcttttcgcaaaatacgaatttgtttgctttaatcgctttcaaaacgcttgattcatgtgccggtccccagcttgttactaagactgcgtctacattttcggctgcgattagactgtcgtcatccggatagaccttggcgttcaggctgtagtccgttacaacttgctgagctgcctcctggttcacatcggtgaccgcgacaatttcgccgccggctaatttatttgtgatgcggttgatgtgttcttttccgattgctcctgtaccaataacaccaatgcgtagtttcattgatagccactccttcaaatgtagttacataatttttcttgtttgcacttgcccagcttgagccggaggagtcccatacagctcttcctgaatttgttcaagcgacttaccggatgtattcggtgcaaaaaagagcccgatgagcatgctggccgttacacatccaaggagaatggccgccataaatgcaattccaaaattcgagatgatcattggaacgaaaaggctccaagccccgattgagatacgaacaaggaagaacatcaatccttgtgcagatgcgcgatattccgtcgggaaaatttcactcgcccataattgatagttggcctgttgccccgccccgttgtttatgccgatcatcacgataaagaggatgagaatcggcatgccctctgccggaagcagaaacaatgaccagccgatcaccgccgcaaatgcggagatcccaaacactgtcttcctgtatttgtctgcaaacggcatgaagataaaagcgacgccaagcccggtgaaaataaacagccccatctgcaaaatatttgccatggtcgctgatacatcgccgacctgctgataaatgtaaggcataaaaaaccccatgacacctgcagccagattccaaaccaagtacacgcccattaagaataaaatgcttttcaaatacttaggctgaagcaaatcgagataaggcgtcttcggcttcctgacggcttgagccatttcggattgatcctgccaggcatcggattccggcagccttttccgcagaacataagtaatcagtgcgataacgagcaaatgcccaaacacgattttattgcccaataagcctaaatcaccgagcaggaccgacagcagcagaaccacaaccgctcccgcagcccatgcgacctgtgcaaccccgcaatgacgcgccctgtttttcttaggtgcgttctctgcgatgatcgtccaggaagccgtaatatcagctcctaccgataaaccgataataatgtaaccgcttaacaaaaaggggaagctggtgccgaataaaactaaacaaatgcccagtgcataaaccagcatactgttcgtatagacagcctttcggccaattttgtcggccaaaaagcctccgagcagcgctccgattgctgccgaaatggcgttggcgctaaatgcgccgagcagtccgatctgtgtatcagaaagcttcaggtaactgacccataaagataatcctgccgatcctgcgacaatggagcctgcatcaatgtaatttgccaaagctgctgcgacggttcgtttattgaatggtgagactgctgcacttccattgctcaatttagagcccccttaattggttgctgggacattcaacaagtgacgatcgatgtactttctggcgatcaatgcgtattcaagcgggttggcaacatcgggatcctgctcggcttccactacgatccagccggaatagccgtgctttaaaagcgtttgatatacttctctaaaatcgatgcagccgtcgcctggaactgtgaacatcccttgcagaaacgcctgttggaacgaatttccttcccgcttgcatttctccatgatcttaaggcgcgcgtctttaaaatgaacgtgcctaatacggtcaatatgcttctctaaaatgttcatataatttccatctgaaatgtaggcatgccccgtatcgtacagaaggtgcacaagtgccgggtcagttcccgccatgagccggtccacctcttcctctgtctgcacgcctgtgccgaggtggtgatggtagacaagcttcagtccgtaacggccggcgatttccccgaggtgatttaaaccttcaaatagccgctgccattcttcatcggtgaaataaggcttttctttaaacacgtttttatccaagccctgcacactgtacgtctgttctgatacgaccgcaacatcggcatggacgtcttttaagtactggcagtgagccgcaaattccttggctgcttcttcaatgccgtcccgaatgatatagctgctgaaccacttgccggcaatccttagattcctcagctcgagctctttattgagaatggccggttccggaaaaaagccgcccacttccgtgccttgaaagcccgcaacaacaatgtcgctcaacaaatgctgaagtgtgtttcccgcgccgatttccggaatatcatcgttccgccatcctatgggggcgatgccccatagaatttgtgtcttgcccatcctggtgcctcctttaatactgctttgcagattccagcattttttcttttgctttatacgccttttgcacgctttcctgttcggaaacctctgcaacacctacgtgccaccagctgtcatagccgtccgtcatcgttttcggcagcaccttcatttcaatcaatgttgagacatcttgttttttggcatcttccagcgccgcttttaattcttcaatcgtgttcgctttgtaggttttcgctccatagccttcggccactttcgcataatcgacattgagaatctgattgtctgctgttctgaattcacagtagtagctgccgtttccatggtccatttgcagattgttgatgcagccgaatcctgagttgtcaaagagcagcacgttaatttttttattatattggattgctgtaatgagctctgagtggagcatcaggaagcttccgtctccgaccagtgaataaacttctctatcaggatgcgccaatttcaagccgagcgttcccgatacttcatatcccatgcaggaatagccgtattccaggtggtacgtattcggtacgtttgaatgccacagccgctgcagatctcccggcaaagagcctgctgaacaaatgacgacgctgtccggatcaactgtttcattgatggcgagcaatgccgttgtttgcggcagttcggtttgcagcacatccgcatattcgttgagtatgtcttgagaaaagtgatctttaatttcaggagtgaagttttcgcgcttaaatgttaccttgcttaagcggtcgcgttcagcaagccattcgtctttcagctccttgatggttgaaccgaactcgctcttatagccttccaataagccgtgcagtttgccgagcgttacttttgcatcggcaacgacttggaaagcatccagtttataagcctgcattctgctgacattaatgtttaaaaattttgcgttgtcaaagtcaaaagcggtttttgatgatgtcgcaaaatcggtatagcgcgtgccaattccgatgatcaggtctgccccgcgagccgctttgtttgccgccagcgtaccggtgattcccattccgcccaaattgttggcaaaatcggcttctactgtggatttaccggcctgggtttctaccagcggaatattgtaagcttcagacatggcgatcaattcgtcgcgcgcgccggaatatttcgctccgccgccgaccaagatgagcggttttttgctcgacttgatcagttctgccgctcccttcagttcacgctcgctcggctctttgcgatcaacatagtgaacgcgtttttcaaaaaagctttcatcgaaatcataggcctcgccttcaacatcttgagaaatgcaaatcgttgcaggaccagcttttgcagggtctgtcattacttcaaaagcgcgaatcagactgctcatcaactgttcagggcgcgtaatacggtcccaatacctcgaaacaggcttcaatgcatcgttcgtcgtaatcgccgcactgtattcctgctctacttgctgaagaacaggatcaggctgtctcgtggcaaatgtatcggctggaatcaagaggactggaatgttgttcgcaagcgcagtacctgcggctgccacaaggttagctgctcccggtccgactgatgtcgacacggcatagatcttccttctcagcatttgcttgctgtaagccattgctgcatgcgccattccctgctcatttttgccttgaaacacctttaagtggccggcatcctgttcaagcgcctggccgattccaacgacgttcccatggccaaaaatcgtaaagattccctcgacaaacggagtttcttctccatctacatggatgtactgctgatttaagaacttaattaacgcttgtgctgtggttaaacgtattttcttgcccacaaacgatcccacctttattcatattcttcatttaagactgagccgcaataagctcttcaatctcggcgactgtcggcatcgcttcagatgagctgtgctttgaaacaacaatcgaggcggaagcgcttccgtatttcagcgcggtttcaatatctttgcctgaaacgagtccgtagaggaaggcggaggcgtatgaatcgcccgctccaaacgttttcaagaccttcgttttgtacgctttcgcccggaagacgtccccggatttgctgtatgcatatgaaccttcgacaccgtgcttgataacgacaagatctgcggaatgtgcaaataaatgctgaacagattcttcattgctgccgccgctcttattttccattacatcaaactcatcacgcgtcccgatgacaatgtctgattgttcggcaacaagcgtatagtagacggccgtttcctccgcagatgtccacgtatatggacgatagtcaagctcaaagaccactttcacttgatgctttttcgccagctgtacggctttcagcaccgcttcgcgggaagggcttttagccagcgccgtacctgacacaagaagcatcttcgatttggcaatatagtcttcgttcacttcagaaggggcaaggtaaagatctgcaacatcatccctgtacattaaaatgctgcattcttcagggcttaaaatttctgtgaaagcaagcccagctttatgtccgtctttatcaaccgccatttgtgacgtatcgacacctgtatttctcatataggtttcgatgaatctgccgtgctggtcatccggaatcttcccgataaatccggtcttcaagcctaatttggaactgccgattgcaatattagccggggagccgccgacatattttgaaaatgtcatcgtctgctccatcggcctgttgtattcgactgcgtttaaatcgatgcatgcgcggccgatcgctacaatgtcaaattctttctcttcattaaacgtatacttcatcttcaacagcctctccttgccttattgttagcgttccaaaatccattcatggtcagggtcgttatgaaacttccatttacgcgtcggccctgccatcacgtttaaataataggatgtgtatccgtcaggcaccccgacaggatggtatccggccggcacgatgacaacgtttccattttcaacagtcatcgtctcgtcgatggaacggtcatccgtgtatacgcgctgaaatacgaagccttgctgcggatcaagttcatggtagtatgtttcttctaaaaaggactcttcaggcaggttgtcttggtcatgcttgtgcggcggatagctggaccagtttccgctttcagtgtagacttcgacgactaaaagactgttcgctgaaggatctgaatccggaagtatgttatggacggttcgtttattgctgaattttccccggttctcaataccgttgtcttcagctttgatcagtttcgtcggaagctggttttcagaaggtgaatagcacagggcaactcttgcctctgtaacggcggtaatgccgaacttgcggtcatttgacacatatacgctgtcggtcggctttctttcgaaaacgctttctctcgtgccgatattttcaaatgtctgttcatgatcggttgcggtaatctttccggtaagcgcgacgatgcagcattcttgtttgctcagcgattcttcatagctggatcccggtgcaagatcaaggactttaaactcgacataacttagatcggaattcgattttttcacttcgtgtacaagcttcacgccttgtgacagctcattcgcctgcggcttgcgcaacaaatgactcatggataaagcctccttttcaaacttgaaacatgatccgaacagtgcgggaaccgcaccgcccggttttttcacaattaattgaagtcaggcgccggatatcttgcagtgacgacctttttgcgcgtatagaaatcgacgctgtcttttccgttggcatgcaatgtaccaaagaacgaagacttccatccggagaacgggaagaatgccatcggagccggtacacccaggttgatgccgagcattcccgcatcaatgttttcacggaaatagcggatcgcattcgaattcgatgtgaacaagcatgcgccgtttgcaaattcggactggttggcgatctcaaccgcttctttcaagttcttcacacggatgaccgatagtacaggagcaaaaatttcgtccttccagatcgtcatatcagttgtgacattgtcaaagattgtcgggccgacgaaatagccttcatctgtaacattttcgcgtccgtcgcagacaagtctcgcaccctcttcaattcctttttgtatatagccgagtgtgcgtttcttgttgtcttcgcgaatgacaggcccgaggaatacaccgtcgtcaagtccgtttccgattttgacttcagatgctttctgaaccaatttttccatgaactcatctgcaattccttcttcaaccgttactactgcgcatgccatgcagcgttcgccggcagatccgaaagcagcgccgataatatttgttaccgtatcttcaaggttggcatcgttcagaacgatggtgtggtttttagcgcctgtcagcgattgaacgcgtttcagattttcgcttccttttttatagacatattctccgaccggttttgaaccgacgaatgaaatcgctttaatttccgggtgttcgagaatgccgtttactacatcatgtgcgccgtataccacattgaagaccccttttggaagtccggctttttcaaacagttcaactagcttttccgtcaaaagcggcgtccgttcggaaggcttcagaataaatgtgtttcctaacgcaatggccattgggaacatccagcatggtaccatcatcgggaagttaaatggtgcaattccgccgacgactccgatcgggtaccggtagttcgccgcttcaacatcggttgcaattgtagcaagtgaatctcccatcatcagtgaaggcgctccagctgcaaactcgacattctcgatgccgcgtccaacttcacccaacgcttctttcgtgttttttccgttttcaatcgtgatgaggtgggcaagctcctctttatgctgagttaaaagctgctgaaagttaaatagaattcttgcccggcgcggaacagccacttttgaccatgttttaaacgcttcagccgctgtttgcgctgcgtattctatatcctctcgcgtcgaaatcggcacttggcacagcacttctttcgtcgctggattgactacatcttcatatttgtcggttttgctttcaacccattctccattaatatagtttcttaactttctgatttctgccattcttataacctccttgaatattaaacatctcctggtacagatggggcaggtttcaaccattatgtatgaatgccgaacagctcttcattgcacaacggattttcgcaaaaaacaggaattaaacgcttacaaaagaaattaatgaatagaactatgattttatccaaagaaccatgacgcaataaaacgtttacacatcagaaatttctcaacattatcatgttttggtcacttcttggttatattttaatccggccttacccataagtcaatcaaaatcattaaatttttcttttgtaagatttgtagaaaacgttaaaatgatttagggaaacattgtataataaaaagaaacagggcaaatcttgcaaaaaataatcaccaatggtatcattttttaagcaattattggttaacttttgggttcgtcatatatatttagtcaaatatactagaaggagatacttagtatgaagttaatgcggattaaagaaatggaagattatattttgaccaatggcaccgtttcgcttgatgaactatgccaggtctttaatgtttcaaaaaacacggtcagacgcgacattaacaagctgaccgagaaaggagttataaaaaaagtctacggcggcgtaacagcgatcgaaaaaacggccttgatcccttttgaaaacagaaccattcaaaacaaggatgccaagacaaaaatcgcgcgctatgcttcacgctttattgaagaccatgacctgatttttattgattccggcacaacgacccgatccatattggaaactcttgatccaaataaaaatgtaaccgttttaacgaacagcctcgacattatcaacgctgctgcagcgatgcaaaatataaacttgatcatcatcggcagcaactacaaacggaaaacgcagtccttcgtcggcatggatgatccgggaacgctggataaatataatattaataaagctttcatgtcggcaaccggcgcaacacttacccatggactgacaaactccgatctgcttgaatatgaaattaaaaagaaaatatccgaaaaagcaaaacaagtatatttgctggccgaccattccaaattcgggaagtcgaccctgctgacgtacgcgccgtttgacagattgcacgcgatcgtcacatctcaggcgcttgatgaggaatatcacgtgtactgtaaagatcgcaaaattgaaatccatttggcaaaacatgtatagttgaagcggacacccttgaccggctgtttccaagcggccggccaagtttatttatctacacatcatatcaggaggggaattcaatgaaaaaagttaaagttggcaaatcagacttgcacgtatttccgattggtttgggaaccaatgctgtcggaggacataacctttatccgaatctcaatgaagaaacgggaaaagaattggtgcgggaagcaataagaaacggcgtcacttttttagataccgcctacatatacggcatcggccgttccgaggaattaatcggcgaagtccttaaagaattcaaccgcgaagatgtcgtgattgcaacaaaagccgcccataagaaagaaggagacgattttgtctttgacaactctcccgcatttttgaaaaagtccgtcgaagaaagcctgaagcggctgcaaactgactacatcgaccttttctatatccattttcctgatgaaaatacgccgaaagacgaagcggttcaggcgctccatgaactgaagcaggaaggcaaaatcagagcaatcggtgtatccaacttttctcttgagcagctgaaagaagcgaacaaagacggattggtggatgtgctccaaggcgaatacaacctgctgaacagggaagctgagacgacattcttcccgtatacacaggagcataacatctcatttgttccttacttcccgctcgtctccggattgctcgccggaaaatacagcgaagatacaacgttcccggaaggcgacctgagaagagaaatggaaaacttccaaggcgaacgcttcaaagaaaacattagaaaagtgaaccagcttgcgccgatcgcggaaaaacataatgtcgacatcgcccatatcgtcttggcctggtacttggcgcggcctgaaatcgacgtgttgatcccgggcgccaaacgcgctgatcagctgatcgacaacctcaaaacggcagaagtcaatctgtctcaagaggacattgatttcatcgaccggctgtttgcccgctaaatgatcaggaaacctatcttaaaagataggtttctttatttttaaaatcctgttgacagcgcttccatttttgatatgataggaaagaagttaatacaagtgacggagaatgggagattcacaataagaccctcttgtgccaggggtttttttgtggatctctttttcttcgtcatctaagagggggcgaaagcaatcgtaatgaatagacggcacctttattctgtataacagcttgaaaggagagatcatgttatgaaaagactagtccgcagcatcttccttataacggccgcaatcgctgcttttggttttggattcagcgggcatgcggaggcggcaagccattcccagccgcagctcaatccgaacaagctactaaatgtcgcgcaccgcggcgcatcggggcatgctcccgagcacacgcttttggcttataagcttggacaaaaaatgaaaggcgattacatagaaatcgatcttcaaatgacaaaagacggccacttggtcgccatgcacgatgagacattggatcgtacgactaatggtacgggttttgtcaaagactatacgctgaaagaaatcaaagagcttgatgcaggctcctggtttaacgaagcatatcctgagcgggcaaaaccggagtacgccgggctgaaagtgcccacccttgaagaaatcatccaaacattcgggagaagcgcgcgctactatatcgaaacaaaatcaccggaagactatgatcatatggaagaaaagctcctggacatcctgaagcaatacaaattgaccggagcagacattcattcaagcaaagtcatcattcaatcttttagtcctgaaagcttaaaaatcattcataacgctaatccaaacattccgctagtgcaattattatggtacgacaaacctgctgccattactgacgccgaattaaaacaatatcaatcttacagcgtcggactcggcatgaactttgaccgcattggccgggcatacgtgcaaaagattcgacgcaccggcatgctggtccatccttatactgtgaataaaaaagaagatatgaagcggctgctcgattggggagcgaccggaatgttcaccaactttccggaccggctgcgcgatgttttgcgcgaaaagaagtaaatgaataaagaaggggaataccatgttaaaactgtttaagccagcaccgccgattgagcggctgccggaagatcaaattgattcggaatataagaaattcagactgcaagtttttctcggcatcttcatcggttatgcggcatactatttaattcgcaaaaatttctcgcttgccatgccttatttgatcgaagagggcttttcaaagtcggcgctcggctttgccttgtccgctctatccatctcttacgggctgagcaagttcgtgatggccacgatatcggaccggagcaatccgaggatgttcctgcccgccggtttgatcctttccgctgtcatcagcctcttgatggggtttgttccttttttcacctcatcgatcgccattatgtttatcatgctgttcttaaacggctggttccagggcatgggatggccgccgtcagggcgtgtccttgtccactggttcagcgtcagcgaaaggggaaataaaaccgccatatggaatgtcgcccacaatgtcggcgggggactgatggcgccgattgccgttgccggcgtcgccatcttctcaggcataacgggatctgctacaggctatgaaggtgtgtttattttgccggccttggtcgccatcgccgttgccgtcatttcttactggctgatccgggatacgccgcagtctgtcggacttcctccaatcgaggaataccgcaacgattattcaagcaaatcgaagaaaacctttgaaaaggaattatcaacgaaagaaatccttttcaaacatgtattaaataataaatgggtgtgggcgatcgcacttgccaacattttcgtgtacttcgtccgctacggcgttctggattgggctccaacctatttaagcgaagaaaaaggctttgacatgagcaaatcaagcgtcgcttattttctgtatgaatgggcggggattccggggacattgctgtgcggctggatctctgacaaatggtttaaaggacgccgcggaccggcaggctttgtctttatggcaggtgttttgatcgcggtgcttgtgtactggttcaacccagccggcaatccgatgatcgacatggcatcattgatcgcgatcggattcctcatttacggtcccgtcatgctgatcggccttcaagcgcttgactttgttcctaaaaaagcggccggcacggctgcaggattgaccggtctgttcggttacctgggcggaaccttgacggcgaatgcgctgatgggtgttatcgtcgatgcatccggctggaatgcgggctttacgcttttaaccgcttcatgtgcaatcgcagcactcatatttgcgatgacttggaatgtgcggggacaggaagttgtgaagcattaacatcaaaaaaagatacatctcgcaagaagctgagatgtatctttttttatttttatgccattactttgcatatatcgttcgtaaattcgacggggtcttcaattggcaagccttctatcagcagcgcctggttgtacaggaggccggtgtacagtttgaatttatccttgtcgttgtcaaaagcattctgcaatgttttgaagacttcgtggtttgtattgatttccaatactttatcagcctttacatgctgattgtcaggcattgcgtttaagattttctccatctcgatggtgacttctccgtcagcggcaaggcatacggagtgagtcttcagccgttttgacgccctcacgcttttcacttttccatccagagtctttttcatctcttcaaacaggtctttgtattggctgtcatccccgtcagattggttttgctcgtcatcgttttcgattccgaggtcgccgcttgataccgacttgaattctttctcttgataattcgccagcattttgatggcgaactcatcgatatcctcggtgaaataaaggatttcataccctttttccgaaaccagctcggtttgaggaagcttttctattcggtcatacgagtcgcctgatgcataataaatgtatttttgatcttcaggcattctggacacatattcctcaagggtgaccagctttttctcttttgatgaatagaaaagcagcaggtctttcaacagatctttatgggctccaaaatcattgtataccccgaatttaagctgtctgccaaacgattgataaaaagactcgtatttttctctgtcatttttcagcaagctcttcagctcattcttgatttttttgctgatgtttttggcaatcagcttcagctgcctgtcatgctggagcatctccctcgaaatgttgagcgataaatcttctgaatcaaccattcctttgacaaagctgaaatggtcaggcagcagatccggacacttttccatgatcagcacaccgttcgaatacagttccagacccttctcgaattccttcgtgtagtagttgaacggaatattttcaggaatgaataaaatcgcatggtatctcaccgcgccgtctacgcttgtatggatgtgcgcgagaggcttgtcaaaaccgtaatgcttttccttataaaacgcctcataatcttcatctttcagttcgcttttgttttttctccaaatcggcaccatgctgttgaccgtctgttcttcctggacttcttcaaattcattttcggcgccttctttcggcttgttgaccgcgacatccatcttgatcgggtagcggatgaaatcagagtatgttttgatgatcgcttttaagcgatgaacatccaggtattcatcatagttttcatcgtctgtattctctttcagcttcagaatgacatcggttccggctgattctttcgcagccggttcgattgtatagccgtcggctccggctgattcccattgatgcgcttcatcgctgccatgggcttttgtaatgacggtgacggtgtccgcaaccataaaagcggcgtagaaaccgacgccgaactggccgataatatcgtgcccgtcttttaattcgttttcttgtttaaacgcaagcgagccgctcttggcaatcgttccaagatgctcttcaagctcttctttcgtcatgccgattccggtgtccgcaatggtcagcgttctgttttctttatctgcggagatttttatgtagtaatcgtctttgttaaatgtcagtgaatcatctgtcagcgctttgtagtagattttatcgatggcatcgctcgcattggatatcagctcccttaaaaagacttccttttgggaataaatcgagttgatcatgatgtccagcaatcgcttggattctgctttgaattctctcttagccatctatccctctcctcttttgctcatatgatatacatatatcgttcgattctgttcacaaattaaataacacactgcctacacgatgtcaattgataaggcagcggtttgacaagcggcattccgcttcatataatgtgttgtgaaggtaaatttgaccaaaatgaggtggaaaggaatgaaaatcttatcaactgttcttaaaagagaattggcttaaagacgggagaagtctgcccttttttagacaagccatctcgggaacagtttgatacgatttgacatcctttcttgctgtattttaaatatgtagcgggtaaggtgtagtttgccttacccgtttttttgccggacaggatagcgatgcttcacgctgttctctttagatggcttgttttttcaaaaataagcctgaaggagagaatcatcatgagtattgttcatgtaacgaatttgacccatatatatggagaccgcatgatctttcaagacgccgggttccgcctgctgaaaggggaacatgccggtcttgtcggtgcaaacggagccggaaagtcgacattgctgcgcattttgacgggcagccttctgcccgatcatggaaacattgaatggcagccaaacattcgggtcggctttcttgaacagcatgccaagctgacggaaggcacaaccattcttcagtacatggagaaagcgtacggccggctgtttgaaatcgaaaaggaaatgaatgggcttgccgaaaaaatggccgatgccggagacaaccttgaagccgtcctgaaaagatacggagagcttcaggctgagctggaagcttcaggattttaccaaatcggaacgaaaattgaggatgccgcacaaggcctcggcttggcggaaatcgggcttgaccaggatgtcacggctttaagcggcgggcagcgtacaaagctgctgcttgccaaactgctgcttgaagagcctgatgtactgctgttggatgagccgaccaactatttggatgccgctcacattgagtggctgactggctacttgaaaaactatgagcacgcatttcttgtcatctctcatgacgaacgcttcttaaatgaaatcacgacggttacattccatctggagcatcatgtgatcaaacgttattccggcaactatcaatattttctgaaggagtatgcgcaaatcagggcacaggctgaagccgcatatgcaaaacagaacagggaaatcaaaaagttagaggcgtttatcgaccggaacagagtccgaaaggcgaaacaggccaaaagcagggagaaagcattacgcaaaatcaagcgaatcgaaaaaccgacagattcttatgtcccaagctttgcatttaaaacggggcgaaacccggcgatgactgtactcaaaacggaaaatcttgaggccggctacacagttccattatttaagcctctttccctgaccgtaagacggggcgataaaatcgcgattattggagaaaacggcgccggaaaatcgacgcttatcaaaacgctgctcggcgacctcaagcctctgagcggcatcgtcacagcaggacagcatttacaggcggcctatttcaggcaggaaagcccagcttctcatgatacaccgcttgaaaaattgcgggcgttctatcctgatctaccggaaaaagacatcaggcagacgctcgcggtatccggcttgacgccaaagcatatcagccagcccctttttacgctcagcggcggtgaacaggcaaaggtccggctggcggagctgatgctttcaaacagcaacctgcttgttcttgatgaaccgacaaaccatcttgacgcatcggcaaagcatgcgttaaagcaagcgctctgcgactataagggaacgattttgctcgtatcccatgaaccggctttttatgaagactgggtgactcatatctggcagattgaagcatggcgccgttaagagtaaaagccggcctttccaagggccggctttttttatttggacaatacaagctcacgaatggcgtgggcaacgccgttttcattattcgtacgcgtttcgtaatcggccgaagcttttacctcagggatcgcattccccatggcgactccgcaacccgcccattcgatcatggacatgtcgtttccgttgtctccaatacacatcacttcttcctgcgcgatgcctaatatgtcggcaagctgctgaacagcatttcctttacttgccgcagggtgaagaatttcataaaagaacggcgaacttttcaccattgtatagcgttccttgacgtcttccggtattgcggcgatcgtccggtccagcttttccggctcatcaatgtacatcgcctttggcgccagaagatcttgcgggatttcttcgatcgtccggaaccggagcggcactttggtgacgtatgattcgtaaacggtatacgggctgatttcccggtttggcgtatacaaataagccgaatcaaaaaagtgcatcggagtatcaagcttttggctgagctcatataacgatttcacatcatcatagcccagtgtcagttctgacacaacttcctgagtatgcgtattttgaacgagcgctccgttataggcgatgacataatcgccgtcttcatttaaattcagttcttccaggtagcggcttacaccgccgaggggacggcccgtgcagagaacgatttttacgccttgttttttcgcggcatgcagggcattccgtacttcctctgttacttcatgaagatcattcaacaatgttccatccatatctatcgcgattagtttgtacattttacactctccctgatcagaatcgagccctaacatcgtacttatgacccataccttctttattgtatcacagcttttcccggtcattttcatctgatgcccacggaaaaaacgccttacagcaaataaggcgtttttcgggcaagcttggcctgcttaaaatatttcttgcagaatcggatcttcatcaagaatgcgaagcgctttttcgcgatagccggcttcatgcaagtacgtatagcggttgggcttgacagtgtgcgacaaattgatcgcctcgcgaaactcatctttgttcagattcagcgttttgacatattggaaaaagcccgttctcgtaaacaccttttcaatccgctcagcccggtgatcctgtacatgggccatgatgtaggtggctaccccgacttgaatgccgtgcatctgcggttttttcgaaattttgtccaaggcgtgggatatcaggtgctcagaaccgctgatcggcgcgctgtttccgctgatttccgtagcgatgccgcccattgtcaaagaactgacaagctcttttaagaagatcggctgtttaatatcctgcatcggcgtacggacaaagctgttgaccgctttcttgctgagcatcgacgcaaacgcatttacatcgccgaccccgtgccgctcctcaaactcccaatcataaagggccgtaatattggacatcaaatctccgatccccgccaaaataaagcaatccggcgctttttgaataatgctcaaatcagctatgattccgtagggaacccttgccggaacggttgttttttttccttcgacctgaagcgagcaattgctgctcgcaaacccgtcattggatgccgacgtcggaatgctgatgaacggggtccgcttggaaaaggcgatgtattttccgcagtccacaacatacccgccgcccatggcaataatgacatcgcaattcccgatcgaaaatgcccgcttcaaaagctcctgtatgtccagattggacggcagcagaacggcttcaactttaacatgttgaaatgcggttttcagtgaatgctcatactgctgataggaaaaatcgtcaaaaaacatgatcgccttggcaaactgatgttttctcaatatctcatccaaccggccaagcacgccctcactaatgtccaaaaccgcggggatggctatgctggtaacctggcgcggcattagacgatccgccctttttctttaagatattgttcaatgtcttcaaatgtttcaacggctacaaatggcaccccctgctgacgcagcaaatcctggagcgcatcctttgcaaacgtaacatccgcaaatttagccgggtgcgaatccggttcactgtcgcctgcaaaataaaccgtctcatactcttctttcagcttttgaatgacctttgatttatcaatcccatagcgctcagagtaatgccaatgattctcatcaatgtccatatgaacattgtcttctttaaaaaagcctttatttgaatagacctcaacgtctgtaatcccgtatttctttaaaatataatgaatgtaataatccgtgccggcgcttaaaatgtagaagtcgccgccgcttttctggacatgctgaatgaagtcaggcacatattcatcaatcggtatggaatggatgtcatcaatgattttttgttcgctttgattaatcgaagcaaaaacggttcccaaaaattcgatatcttttaattctccggacttccacttcttgaacaattcacggccttcgggaaaatatttatcaatgaccatccagtaaaaatcctgtttggaaatcgtcccatcaaagtctgatacaaatgcccatttcttcatgctgcatacctcttttctatggtattttaaaagattagattcattatacaaaaagtttgtgaatcattgaacataatattatttcttttttgtgtactttcgttcacaagctgaatattcgtccccctgaaaggaggcgtatataatcattcttgatctgtacgctgcttacctttctctgttacggcaaatttccgcttcatcgttttgatgttttccgccttgcgaaatctgagcgcagaccagtcttcatcaattgcaatttggcgaaccggttcatagccctggtctgcaagcagtccggctactgtatcgcggctgcagtccgatcctttgtagactttcgatgattttttcgggtagcaaagccaaaacagaccgtcttccgccaaatgacgttcagcctccttggctaaagcctgcagctttgcgttggtcgctgcgaatacctgaacaaaatcatattggtccgattcggcgtgatgatgaacagggccttgaaattcagcgatgacgccgctgtatgcctcaggcggattcacaatcagtacaggctgtccattatccttgaactgcaattttttgatcaccgggttcgtttctgccatctctcatcagtcctttttctgtttatagtaacaaattaaccaaaaccacactaatcatacttagcaaaaaaagtgatagacgagagagggattgatctgctatatttacattgataatgcgaatcattatcacttaggaaatgtcatatgtttcacatcaacaggagggtcaagtgaaaaagaacttattgataatcggtttagttatgctgttgtgtatagtggtcagcgcctgcggaagcggcaatgcgtcaaacggtagcaaagaaaaagcggctgaagaaacgacaagaacatatcaatcaacgcgtggaagcgtgaagattccaacacatccaaagcgcatcgtgacagacttttatgccggtgaactgttcacggtcggcgccaatgtcgtcggctccggctcgtggtctttctccaatccatttttaaaggaccgtatgaaagatgtaacggatttaggcgacccgattaatgtggaaaaagtcatgaagctgaagcctgatttaattgtcgtgatgaacgatgataattacgacaaactgtccaaaatcgcaccgactgttgtgattccttataacacggcgaaaaatgttcaggaaactgttaagatgttcggcgacattgcaggagctaaagaagaagctgaacaattccttgccgatttcgaccggaaatcgaaagcagcgaggaaaaaaatcgctcaagtcgtcgacaaaaatgctactttcggtatttatgaaaacacagaaaaaggccaattctgggtgttcaatgacaacggcggccgcggaggccaagccgtgtacaacgcgctcggcttaaaggcgcctgaaaagattcaaaaagacatcttcaaaaaaggcgaaatcaaagaactttccttggaagtcgtacctgaatatgcagcagactacatgttcgtgacagactataacccgaacggcgacagcaaaacgctggacaagctgaagcagtcttccatttggaaaaaccttgacgccgtcaaaaacaaccgtgtctttatcaacgactttgacacgttctatccgtacgatccgatctctgtcagcaaacaggttgatttgattacggagatgctggtgaagcgcgaaaaggagaataagtaaaaaagctggaatttccagctttttttattgttttctttcttgaatgcttgaaaacctaaaagcaaattgaaagatcaaatagaaaggaatgtagaaaagaaaaaacatcatgatttgaaataataaccctttcaaactaaatggatatgaaatgtcatgaaacaaaaaagataatgccatccaaacgacaaaggcagaaaacgcagctttaaagccgagtcccctcttttttctcaacagacctttgctcacgagcctaatagaatagtagccgctgccgatgaaaaatagaatgatcagcaacagattgctcggtatttcgtatgctgtcgtgataaaaatggaaataaaaatcagtgaaagaaggagcacaaacccttcaaatccaatttttctctcctgttcagcctttttattttcattcattatgttcgcctcctttctattgttttccattaaaacaaacagaagccatgttaacaataatcatccataaaaacaatgatttgacacgcatgccgctgcttcagcccatcactcctgtttcacgtgaaacaaaaaatgcatcgaaaaaatatatggaatcaagtgtgtgaaaatgaaaataataacaaaaaaaggagagatgatgatgggaattgaaaaggttggacaaatcggggtgccggttcaagacttggagcgggctgcggcattttatcaggatgtattgggcctgtcccttttatttcagacagatcgcatggctttctttgagtgcggcgaagtgcggcttcttctcagccttccggaaaaagacgaatttgctcatgcaggctccgtcatttattttcaagttgaagatttgccggctgtatatgatgaaattgcaacaaaaggcgtctcttttccaatagagccgcatgtggtggcgaaaatcgagcaaacggaaacctgggtggccttctttgaagataccgaaggaaataccctagctttgatgagtgaggtgaacatataaaaatgaaaaacagctgatccctcagctgtttttcgtttttacatcatcacaagccgattgacaggtgcgatttaattcacaggcggcgcattttcctttccggcttcgtttgacaaattttataagcgtccatgccgcataactaaagataagcgctccgatcgtaatattaaacagcatgctgtcacatccttcctatgataacccaagcagtcgtccgccctgataaatcaggaacgcgatcgcatatgcaatggccagtccgtaaacaatggacaagaacatccactttttcgagtttgtttcttttttaatcaccgctactgtcgcgaggcatggtacgtataaaagcacgaaagccataaatccgtaagcggccaacggtgtaaattgttcagccatcatgccttgcagctgggcttcgggtacaaaatagatgatgctcatcgaagcaacgacaacttccttcgcgagaaaaccggttaatagtgatgccgctgcctgccatgtgccgaatcccagcggcagcaatagcggtgcgagcactcccccgatcatcgctaaaaaactgtcatccatcgcaacgtccgttccgccgggtcccgtatacgacagaagccaaatgaggacagacccgccaaaaatgtaagtgccggctttgcggacgaagcctttgcccttctcccatgttgcccgccacaatgtacgcgcttgaggcaaacggtacggcggcagttcaatcacgaagaacgacttttcttctttgagcttggatgaggataaaaacttcgccagcactagcgctgcggcgatgcccagcacatacaaggaaaggacgacgaaagcctggtgggccgcgaaaaaagcccctgcaaacagagcataaaccggcagccttgccgaacaggacataaatggcgtcagcataatcgtcaagagtctttccttaggctgctctacagtccgcgcagccatgacgccgggaacattgcagccgaagccgataatcagcggaataaaggctttgccgtttaaaccgatcgcctccatcaggcggtccatcaccatggccacacgcgccatatatcctgaatcttcaagcaccgaaatgaagaaaaacaggataaagatctgcaggacgaacacgagcacaccgccgacaccggcaataatcccatcgagaataagcgcctcgataaacgggctggctcccattgccgacagcgccgaggccgtccattccgtcagcggtcccccgatgaaaccgtccagtgcatcagacaatggaacgccaaaccaatcaaacgtcagcatgaacatgagatacatgaacaacaaaaaaatcgggatgccaagcacctgatgcgttacgatctgatccacgcgttcagtcagcgtcagttttcgctctgactgatattgcacagaagttgacaagatgcggtcaatccatcgcgatctctcattgtaaatatgctgatgcagcgatcttacggaatgctcctgatgaaggcgtttttcggtctcctcgtaaatttcctttaatctttcgctgtcggccgcgtcctccagctgttctttcattttcgagttgccttccaaatattgaagggccatccagcgctttaaaacgccggggagttcgggtatgatcgattcgatccggccaatcgcttcttccactgcgcttccgtaattgatgacgagcggctccgccctcttttccttttcaaaaagcaaatgcctgctcagttcatcacatcctttgccgctgcgggcaatcacaggaattaccggaacacctagcgcatcagacattttttgatgatcaatgaagacgccgcgctgtcctgcgacatcgatcatatttaaaccgatcgtaagcggatgcccaaattccaggagctgcacggttaagtgcaagttccgctttaactgtgatgcatcgacaatattcaatatatctgaaaatgaatcattgagcaggaagtctgtgacaaccccttcatcgcgggacagcggactcaatgtataaacaccggggagatcgactatcattccttgtttatgacggagcagccccacctttttctcaacagtcaccccgctccagtttccgacatactcataggagcctgtcagcgcattaaacaatgacgtcttccccgtattcgggtttccgaaaagggcaatctgccggctgttcatagcttttcaatcctgatcttttttgcttctccaagccgtatgccgagacactgcccgcctgactcgaacatgaacggaccgccaaacggcaatttgcgcttcacgcaaatttcatcatcttctttcattccgagctgtatgagtctgcgctgaacaagttcattcacgtctgaaaaatctatgattcttgctctctctttttgttttaattcggctaaaaccatcgttgaggcctccgtattctgaaaatgataatcgttatcataatatgattataggcaataagtcaccttccatttaaaaggagatgtgtcaaaaccggaacatttttatgagaatataaaaaagcgaaaaaccccggcgatacaatctttcgctctggcttttcgctctatcaagttatgtcgttaacctgcatgatggcgcactttttgctccattcgcctctttttcggcacataaatttttccgacaaacatatagccgtacttcaatttattgacggcccaggatatgaaaaccgcagcgcctgtagaaatgaaaaacaaaagcaaaacagccgataccgtaccgatgctgtcaagggcggttaagatgaccaacccgaaaatcaggataaaagcgtgcagtaaataaatagaaaaagaatagttgctgatcatcataatcagcttcggtaccgacttcagttttgaaaacaggtggaagcataagaaaatgatgcttgtcgaataaagcaggatatccggacgctttgacgtcaccgcgatgtcttggccgaagtaggaaaccgctacaatgaaacatccggtcacagcagccgccgcatacaccgcatgcctgtaccgttccagcaatgccaaaaagcgctcgtaattcttgccgcaataataggccaaacaaaagtaaaagagccagccgggaaacggcacccacgaaaaaggaaacggcgcctcctcctgaacgaccggaggttgaatgaacgtgaaatagctcaaataagccgctgtgaccgcaaaagaaatcgaaagcacccatttaggcgaagccttttgcaaaaatgaatggaagcacatgtgcagcaagtaaaattgaaaaatgacgagaatgaagtaaccgatgaaattccccaagaatatattcgccaacagttttttaataatgaccgatgcatgaaattgctgcatcatcagacctgcggtcataaaagcatccaaaacagcgataaatagaaaagggatgaaaattgttttaaaccgcttttttaaaaacccttccggaacaccaccaggataggcatgcgcgagcaaaaattcggaaatgaaaataaacgccggcgtactgaacatcaggagcgttctgaaagattcaacaacccggaaaaccgcatctccgagcatgtccgcccgcaccatgagcaccattgatatcgcatgaagcaaaacaacgcttaaacaggagatgcagcgaatgacaaaaatttcttttacttgcaaatcgatcactcctctttcaaatttgaaataatatcaaattaacataatcatccaaatgaaggaagaggcaaaatacataggtatgtttatcccaaatttgccggctgcaagtataaaaaaaagattagacacgtagtctaatcttttttaaatcgccgcttttatctgttttgtatagtagaagcggacgatgaagtaatatatgacctggatggcgaagaacacgccgagcaccattgcagattccttgaagaggttgtactgaaaggcatgcgataaagcggtcagcgccacagctccatggacaagggcaacagcgataggcgcgaagaacaagatgccgatctgcctgttcagcactttatgcagttcgcggtctgttaagcccattttggcaatcgatttgaatttctgcttatcatcgtccaaatcagtgtacaaccggaaatagaggaagcttcctgctgaaacgaagaagacgattccgataaacagtccgacaaataatatcgggccataccctttgcttatattatatacctcataatctacagccccgaaatacatgtaatccagtttcttttgcaaagcctccccggctttcactaaagccatgccgtcagcttcttttgcctgccatgcatagaaccggttttcgcttttcggttttttcagctgtgcgaaatctttgtctgtcacaatataatagctgggttcagataacgcttttgaacggatcgtttgatcagccttcagttgttttccatttgcaaaagggattgacgaagggagctgctggtcatcatctccctctaagccgatcttgacctcatactcggcagccgccgcttttccgtcttcaagcttgacgtggtcggctccgacgagatcggcaaacttgttatagtcagattctttcacaatcagcatgtcattgccgccgacatcgaaatattgaaggacagctgaagctttgtctgttttgatatttctttcatccagtgtgtcattgatgaaagccacgtctttttcgatgtgtttgtttgtttccggcggcttatatgagaacgtatgcgggttcatctctttaattccgtttgtcaccagagtttggaaaccgtacagcgtcccaatggcgctgaatgcgacagtagagataatggccaccataaaaaacgtccgcgaattgtctttcatcctgtaagacagatcagaaaacaaaatcatattcgttttccgccaaaacagggtttcccgttttttgagcctgcggatcacataaacactcagctgcgtaaacagcagatatgtgccgataatgacaacaatcgtcaccggcaccatcgccacaagaacgcctccttctttgacaatcaaagcggtgtaatagcctccggcaagcagcacagcagcaaccagcgtaagcaaggcagatgctttcggctcccctttggagattttgttcccttttaacagaacaatcagcttctcgctcctgagcacaaacgacacaagaaaagagataaataagaacagaccgttaaaagaaataaacgtcacaatcatcgccatcaacgggaagtaaaaatcgagcttgttatcaataatcaggacattttccgcagtgagcagtatcaatttggcgaagacgagcccgagcacaatcccgccgattgtcgcaaaaaatccaatcagcatattttcaagaaataccatcatgcgaatttggcgcatcgacatcccttgaatcattaaaacgccgaattccttttttctcgattgaagaaatgaactcatcgagtacagcacaaagaaaaaagagaagacaaaaataatgccgccggcgaccagcaggccaaaggatgcatgctgcccgatgccggaagtcaaagaatcactggtcatcaccgggtggaaagcaaaaatcgcaaatgcgaaaaaaaccatcaccgtaaacatgctgctgagaaaataagcggcatacagccttttgttgcgaatgacattgttaaacgcgaactgacgaaaggtcatttgcatcccctcccaacaaggacagtgtatcgagaatcttttggaaaaacgcttggcggttatcgccgcggttgatctccgaatacagctttccgtccttaataaagacgacccggttgcaatagcttgccgcctgagggtcatgcgtgacaagcatcatggtcgctttttcattgcggttgatcgactcaagcatttccatcacatctttggatgactttgaatcaaggttgcctgtcggctcatcggcaagcagaagcttcggcgaatgaatcatcgctcttgctacagcggcgcgctgggcctgaccgcccgatatctcatatgtgcgctttttcatgatctgggtaatcccgagcttttcggccaattcgtttgccctccgcttcatttccttgaccttttcgccgtcaagcgtcaaaggaagtacgatattttcttcaacggttaatgtcggcagaagattaaagtcctgaaacacaaatcccagctctctgcggcgaaatttagccaatttttcttttttgagaacatgcgggttttggccgctgatcaatatttcgcccgtcgtcggctcatcgatcgttgcaatcatatttaatagggtcgtttttccgcttcccgacggccccatgatcccgacgaattcacctttatcaattgttaggttaatatctgttaacgcgcggtacgcaatttttccttcgtaaatcttactggcttgtttgacctgaagcatcacaagatctcctttcacctttaactttcgatctgtgaccagtttacctaaatctcttgttgatgaactatcgattcttctttcactttcattacatcgatgtaaggttttgcgtagccgtgaaaatcagccgaattgtcgtgcctttcccttcttgtgaatcaagttcgatccggtggccgagctggtcagccgccgattttgccaagtaaagacccattccggtcgattctctgaaacggcgtccgttttctcctgtgaaaaacgggtcgaaaacccgcttttgatctgtatccgggatgccggcgccgaaatctgccacttccaataccgcttccgaatcattttcgtatacagaaataatgactgtattgcttttccccgccgaatatttgaccgcattgttgacaaactgggaaatgatgaaaaacagccacttttcatctgtttcgacggtgatgccttttttgatttctttgaacttaggataaacttgactgcgaatgtaaaagcgcttattttcgcgattgacctcgtgaacgatatccgccaatgcgaccggttttatacggaaatcctgttcgatcgtccgcagtctggccatatagagaatcgtattgaggcccgttttcatccgctcggtctcctcgcggatgctggatgattccggttcatccaaattttgagccgtcagttcgatgaccgacaacggcgtcttcatttggtgcacccattgatccatgaaagtcaaatgctctttttggccaagctccagcttctttaattcttggcggtattgcttgtactggcttttcagcagctgttcaagcgcttccgacaaaggggattggggctgattcgattgcctgaaggtgtcatccaatgactccagcccgctcgtcatccgtttgtagaacttccggcgcgtatagtaatggtagaaaagatagaagccaagaaagaaaaagccgagaaaaacggcataaaaagccggtctgatgtgctgatacccatcaagccagtacactgacagcattgtgataaactgcagcgcctgcacggcaatcaacaaatagtgctctttgaaaaaaagcttcattcctctcccgccttcacccaggatacattcaagcgatagcccgcgccccgcactgtttccactgcatcttcaataccgagctcctgaaacttttttctgacgcgcgtaatgttgacattaagcgtgttttcatccacatatgcctgatcatcccacagcttggccagcaaatcttcgcggcctgaaattctcggatggcgttccattaagctttcaataatatccgcttcttttttcgtcaaagcagccgtttgaccggcaaatgtcagttcaagtctttccggatacagccgcagcccttctttttccagcagccgttcctccgccttcgccgcgtattcgccgtaagccctgcgaagctggctgcgtatttttgccatgacgatctcggcgtgaaacggcttggtgataaagtcatctccgccgttttccaatgccatcacctgatccatttcacctgtccgcgcagaaataaacaagacggggcaaatcgattcctggcggatttgccggcaccagtagtagccgtcaaagctcggcaggttaatatcaagcagaacaagatcaggcgccgtgcttctgaactcatccatgacacggtcaaagtctttcactacatgaacgttgtatccgtatttgacaatatgcgattttaacaaatctgcaattttcgggtcgtcttctacaatcatcactttttgcatctcggtctctccttttggtttggatatattatgacacgaagcggtctgataaacaaaaactgccgcgatccatcctaccttacaatcatgtaagtgtattgtaataggaatcaatatcttctctctgcgcttttttataaaataataccatccacaaaactgaatgaaagaggagacggtatatgaagacacgggcgggcggcctgattgccgcggttctgatcgccgttgccggcgtttttatcctgcagaaagcgacaggaggccttgtgccgctggccgatgattatatacaaggccagggaaagcctgaggcttattatctcaaagctgaggatcatgcagaaaagccggataacggaaagtacaactacacattaaccggctatgacgcgagcggacacaaacagcagattgaggcagaggcagacgaaaaactgcatcccggcgctttcatcaaagtattggcgtacggaacgaaagccaaaagcttgactgaagtacacgaagaagaaatccccgagggcgctttggctgccatgaaaaccaattaaaaccccatcgccggatggggttttctgcttaatatttaaatcgattgataatggtttgaagttcttcagccaattgggacagcgattccgctgcatatgagatttcttccattgaagccagctgctcctgggttgaggaagcaaccgcttttgtgctggctgacgtttcctgtgatccggaagccaatgtttgaatggtgttttgaaccatttcgacacctgatgtcagctgctgagtagaagccgcgacttcttggatttgagaagcaacctgttccaccaagtttaaaatttcgttgaaattaccggtcgtctcctgcgacaaagctataccggagctgacattttcttgaacgactttaatattatttaccgtttctaccgattcattttggatcgttgtgaccaatgattgaatgtggctcgctgacttattcgtttcgtccgccaatttccggacctcttccgccacgacggcaaacccttttccttgctctcccgctcttgctgcttcaattgccgcgttcagcgccagcaaattcgtctgctccgaaatatcggtgatgagcgaagaaatgttgctgatttccgccgtgctggacacgagcgcctgcaggccgctgccggccgagtcgactgacttatcaatgaagttcatttgttcgagcattttatgaacggactcggagccgatttcggctttgtctctcatcgaagacgacagatccgctatgctgcctgtattggaggcaacggatgataaacggtccagcaattcatgaattgcttctgaactcttttctgtcatttcgctttgcgtcatgttgctgtcggcgatcgcctgcatctcttcggaaatcagttcggaagtcgatttcgattcctccgcgcttgcggacaactgttcagaggatgcggcgacttgctcagacgagctgctgatctgcttcacaatttgcgtcagcgactggacaaaagcattgaaagaattggcaagctggccgaactcgtctttatttttgacgatcacttttttcgttaaatccgcctcgccgtgggcgatgtcctcaagctgctgattcaggcttctcaacggtaccagaatagacttcaagagcagcagactcaaaacaattcccaatatcgctgatactcctgtgacagcgatgatgacccattcgctcatcgtcccattggctctgatctctgctttcagatcatccacctcttgttccaggctttcgaccagctgattgacagacggatcgaggacatcttttcttaatgttctttcctctccgaaatggatcgattccgcttttttaaggcttgaagcgtaagtctgcatgacttgttgatttaaatcccaataagccttgaagttttctttaatttcttcgacgttcgctttgtatgatttttcccggatcagttttccggcccggtcaagactctttaaaacatcgtcggccttgtccttcattccttcactgtattcatcgtctccggtcataataagggctctctcgtcattcgacaagccggtcagacggtattgaatatgcttaatctctttttgaaattccatcttgtccttaagttcttcattctttttcaccgtagaagaaatcataaaaacagaggagattccgattccgaggattgaaacgactagaattgatatgattcccagcagttttgttttcactttcattatggtgatcctttctcctttatgtcatcaatgatgaaaaacagttttcaaatcaaacatcttcttccctccatagtatcgacatatttcgtcaaaatttgagaaggtgcagaatataagccgaagaaaaagctctgccgggaaggcagagcttttaatgaattggtttacttggcgggcccgccgatttggtatgttcatagaagtggtgaaaataatcatttgtctctgctttgatgactttccaaagcagcaggatggcgatcaggtttggaatcatcatcagcgcattcgccatatcggcaaacgcccagacggtgacgaggttggcaaccgtcccgatgccgcaggcgaggatgtagaccagcctgtagcccgcaattcctttggcgcctgccaaatattcgaagcacttttctccgtaaacataccagccgacaattgtagagaagccaaagaaaatgaccgacagagacacaatgtattcgcctgccgcgccgagtactgaagcaaaagctgcgcttgtcaatgccccgccttccaggctggcattatgggccacgcctgatatcaagccgccggacgggtcccagaaaccggtaatgataagggttaaaccggtcattgtacacaccacgatcgtcacgataaatgtcccggtcattgcgacgagcgcctgttttaccggatggtctgcgcgcgcatttccggcgattagcgccgccgtcccaaggcctgcttcgtttgagaaaataccgcgggataccccgttccgaaccgcttcagatacggcaattccaaggaagccgccggctgccgctacagggtggaaagcataataaaaaatcagcgcaaaagccggaataatcttgtcataattcaaaatcagaatcaagatcgccccgcccatgtaaagaaaagccatgatcggcacaaagaagctggcaacggtgctgatccgctggatgccgccgaagataatgacgctgacgagaatgacgagaatcagccctgtcacccagttttcgatgccgaagctgttcttcgtaatatcagcgatcgtattggattggacactgttgcctatccccaaagcggcaaaagctccaaacagcgcaaaggcgatggcgagtcctttaaatttgcggccgagtccgtgttcgatataatacatcggcccgcttgaatattcccctttttcattttttacgcggaatttaacagccagcaaggcttccgcgtatttcgttgccatccccaacagcccgacaacccacatccaaaagatcgaacccggtccgccgagtgtcaatgccgtcgcgacacctgcgatatttccgtttccgatcgtagcggcgagcgctgtcatcaaagccttaaaatggctcacatccccttcggcagccgcgtctttgctgtcttctttgccaaacccgatcttaaacgcatagatcaggcggcgaaattgcagtccttttaaaacaatcgttaaaaataagcctgtcccaaataataaaattaaactgggcggcccccatagtaccttattaatcttgcctagtatttctaagatatccatatgactcactcctgacaaagataacgctttcatagctgcatgagatattctatcacaatggaaaatggttatgtttgtgaaacgacacaaaatgtaatcgcttacatttgtttttttaacaaagctattttttaaagaaaaaaattttaatagataacttatctcctcaagcctttcaccttattcaacgttcaccaatttgttaaatttcacaaaaaagcgcttacatttttaattttacacacgatgctcttcccgattcagagatttatactagcggtagaatcatatttcatttgagggggacgacatcatgatcattggaattcctaaagaaattaaaaacaacgagaaccgtgtagccattactccggccggagtagtcgcgctaaaaaaaagcggtcatcaagttttaattgaacagggagccgggcttggaagcggattcgaggacgccgactacaaagcagccggggcggacattttggctgaagcgaaagatgtgtggggaaaagcggatatggtcatgaaagtgaaagagccgatcagctctgaatacggctatttccgaaaaggacttgttttatttacttatctgcacttagcggctgaacctaagcttgcgaaagcgcttgtggacagcggcgtcacagccatcgcttacgaaacggtcgaagtgaaccggacgcttccgctcttgactccaatgagtgaagtcgccggacgcatggcttcgcagatcggcgcgcaatttcttgagaaatcaaaaggcggcaaaggcatcctgttatcgggcgtacccggtgtaaaacgcggcaaagtcacgatcatcggcggcggagtggttggtacgaacgctgccaaaatcgctgtcggacttggcgctgacgtcactttgatcgacttgagcgctgagcgcctccgtcagctcgatgaccagttcggcaaagacattcaaacgcttatgtccaatccgctcaacattgcggaagccgtaaaagactcagaccttgtcatcggcgccgtcttaattcctggtgcaaaagcgccgaagcttgtcacagaagagatgatcaagtcgatgtcgccaggttcagttgttgtagacgtggcgattgaccagggcggcattatcgaaacggttgataaaatcactacgcatgacgatccgacttacacgaagcacggcgttgtccactatgccgtcgccaatatgccgggagccgttccccgtacatcaacgatcggcttaacaaacgtcaccatgccttacgccttgcaaatcgcaaataaaggcgttgaacaagcagtcgccgaaaatcaggcgctcgctctcggcgtcaacgttgcaaacggaagcatcacctacaaggccgtcgcgcgcgaccttggatatgaatatgtatctgtagaagatgcatttcaaacggtaaccgctggttaagcggattttatctcttgagaacattttaacaactctttctgactgtcctttcacgaaaaaaggctggatgatatccggccttttttccattctgctttaaacattcaaggccgctttccggcaaacggcgtcgccttcatctaagaaaccggccacaagtcaatttttgaatggtgttcccgtatcaacatattgaaacacatgaagcgacggcaatggacgtcctttaaaatcaaacaatgcctgattgtctacggcgctgccgccaaaccactttcctgcgtcttccgggtcatattcagcagcatagcttgtagcccagcctgatccgtatgtctcccaaagcgctttatttttctcgagccggtgagccggtcctaccggaatccatgccggttcccaatagaaaacgccgattccggcttcacctacgtcgctgaccgcttgaatcacatcacggaccgcgttcgcctgcccttgaacggtgaccggataattcagcgtttggccgtttttcggagctgtatttccgtgtccgtctccgtcttcagccgtatacgtataagatgtctcagcaaccatgacttttttgccgtacgtatctgcgacagatgtcaggacggatgttaaattcttcagcgtgccatgccaaaacggataatacgagcttgcaaacacatcgtagtctacatgatgccgatgaagcgtctcggcaatccaagcgtaccttcctgacgtctccggattggtaaaatgcaaggcgactaggatattcgaatccgtctctcgcaccgcttgactcccggcgttgaataattggctcatcttcgcccaatccgtttcaccggcaaggcccccgtttgtttcgttaccgacctgcaccatgccgatgtcgatgcccgctgctttcatcgctttaaggctttgttttgtatattgataaagcgccgtctttttatcttcaaagtttaggttcgcccatgctttcggcgctttctgtttcgccgggtccgcccagaaatcggaatagtggaaatccgccagcagcttcattccgttggcagtggcccgttttccgatctgaatcgctttttccagatcattattgccccctccgtagccgttgccgttggcatcatagggatcattccatatgcgcacccggacataattgacgcctgcttccttcagcgttttgaatatatcctgtttctttccggattcattgtaaaaggcgacgccgctctcttccaaagcgatgatgctcgaaacatcaaccccttttataaaatccttgcgaagccctgaaaccttttcaacataaaggccgctttttgccgtccctgaatctctggcggcttccgccggaccgcttgttccaaatgcgcccaaaacaaatatcagcaccacaaaaacagccagcacgttcttcatcaatctcgcttctcccctttcataatagacacacaagcaaaaagaaaacgctttcattattcacccggagaaacatccaccttaaagcggatgtcctcccaggcctattcttttgcttttaccgctattctggcctcatatttttccaatgtgacttcgccggccagcgtttctccggtcagcatatctttaactgccgacgccaacacgacgggctgacgtttttccgtgaaattcatgatgaaaatatagtcattttcctcatcctgtctgacttgaacggagacgccaggctgatgtttcacgtcaagagccggttgaatcgctagctctttaatcaatgttccataaaaatcccgatgaaattggctgcttaaacgcgcaccgatataatacgttttcccctgtttgtatggatggctcgtcacagccgtcgtgtccgcataaaagtcgtcctcatagaatccctcgggatctgccgtactgagcttcagcacggtcgcgtaatcttttagctcatacgaccggttttgataacggaccgcatttttatcgcccggatagagtgtatcggtttcaacaggctccatgccaaacatctcttgcagatcttttggccatccgcctaaataggtcagatcagattcgttgacgattccgctaatataggtcatcaccaatgtgcccccgttggcagcaaatgcctttaagcgcgcgattgtttcttcgcttgctaagtaaagcatcggaacgatcagcagccggtacgatgaaaaatcctgttccttcgtaatcacgtcgactggaatatcacgctcccaaaacgcgcggtagtgctcgtgcagggtttggggataccgcttggttttcatcccgaatccttgtgcatcttggagcgcccaatggttttcccaatcgtagagaatcgcgacatccgcaggccggatcgttccggtgacttcagacagcgcttcaagggtttgcccgacttttgccacttctttaaacacgcggttctcggaacaattgtcatggccgacaaccgcaccatgaaatttttccgatgagccgcgggatttccgccattgaaaatagaggatgctgtcagatccgtgtgcgatcatctgcacagaagacaggaggtgcatgcccggccgtttcgctttattaaaatcgtgccaattgacagcgcttggcgtcgattccattaagagaaacggctgctgtttcaggctgcggtacaaatcattgataaagccgactttcatggccaaatctgctgtgctttcccaatcgttgtgccaggcgggatacgcgtcccagctgatcacgtccaggtgcttggcaaacttgctgtagtccagcccttgaaacggaattaaatcatgcgtgtccgccataaaattggtcgtaatcggaatattcggcgtgatttcctttaacggaacgatttcattttgaaaaaaagagatcgtctggtcagtgacgaagcgtcgccagtctaaattcaagccgtgcaccgcattttccccgatcggagacggcgattcaatctgtgaccaatcgttgaaggtgtggctccaaaaaggcgtccaccatgcgtcattcaaagatttaatatcatggttgtacttctttttcagccagtctctgaaggcgtgctgacattgatcacaatggcattctcctccgtattcgttggaaacatgccacatcaaaagggcatgctggctgccgtacctttcagccagcatgcggttgatctctttcgttttttcacggtatacgtatgaagtgaagcaatgattgtgccttccgccgtgcagctgtttgacgcgttcagcattcacgcgcagcacttccggatacttttgcgacagccaagcaggacgggcgccgctcggtgtcgccaatataatccggccgccgttccggtgaatgctctcaaaaatatcatccagccattcaaacgtatagacgccttcctccggctcaagggcgctccatgaaaaaatccccactgaaaatgtattcgtatgggcaagcttcatcagcttgatgtcatctgcaagaatatccggacggtcaagccactgatccggattgtagtctcccccgtgaagcatgtatcttgcttgggtcgtataaatttttggcataatactctccttttttagaccattttctccttcggactatcctttcgttccgcctgccgtcaatcctgacacaaagttcttttgcagcatgataaagatgacggctaccggtatgctgatcaaaatagcgccggcggcaaacgtcgtatagctggctcccatcacctcattgactaaattgtataaaccgatcggcaatgtatacgactccggtgtccgcaatatcgtcgaagacaaaacgaaatccccgagcggcccggtgaatccgttcatggcaacgaccgcgatcatcggtttggatagcggcataataatctgcaggaaaatccttgtattgcttgcgccgtcaatcttagcgctctcatccaaatcgatgggaatggagtccatataccctttcatcaaatacgtgttcatcggtatgagcccgccgatgtacagcaaaatcagcagccaatggctgttcatcattccaagcatctgcgctaaaacgaagagcgcaaccaaagccgaaaattgaggaatcatttgcagcagcaagaataaaactaaagcgtttttccttcctttaaaacgaaaccgtgaaaaagcataagctgtaaaagaaacgctgatgaccgatccgatcatcgtaaagatgctgattttcagcgagtttatataccattgcccgtattggaggctctctttgccggcgaataattctttatagtgatccaatgtcggatttgccggaatgatagaagtgctgaccaaactgttgccgggattaaagctggcccccaccgtccaaagcagagggtatatgataacggctgtcataaaagccaacagagaataggtcagaaggagccgaaagaatcttcttttcttcatacgttaagccccctctttgaaagaatttgtccgtctgaactgccacagtgcaattgagatgacaaagaccgacagcaggatcgtcaatgcggcggctaaagagtactggctcgactgcatcgtcaatttgtaaatccaggacaccaggatgtcggttcctcccgctgttgacccgggaacagccggaccgcctccattgaatagataaataatattgaagttattaaaattaaaagtgaattgcgtaatgataatcggcgccatcgcgattaaaatcagcggcagtgtaatatgcctgaatttcgaaaacgcagacgctccgtcaatcgtcgccgcttcataaaggtcatccggaatcgactgcagaacaccggttgttacaatgaacacatacggaaatccgagccagccctgcataagaataagcgccagcttcgtccaattggcattcgtcatccaaggaatcggatcgatgccgaatgcggcgaggatttgatgattgaaagcaccgaagctgtcattaaaaaggccggcaaacacgagaatggtaacaaaaccgggcacggcccaaggcaagacaagaatcgtccggaaaatttttttaaagcggacttccttctgattgacgacaaccgccaacaaaattcccaacccgacttggagcgtggaagcgacaagcgtccaaacaatggtccaagctaaaacatccaaaaaggtcgaccgccaaatatcaacggtgaaaatttcggaaaacgttttaattcctacccaatcgacaaggcgggcaggcggagaatggtagaggttatagtttgtaaaagctaatgcaaagctgaacaaaatcggaaaaacaacggcaaaaaccaggatgaacagcgatggcccgctgatgagatacggatatccctgagctattaaattatgatattgttccttgagtgaactgagctccttttgttcatcgcgcctctttccgttttggtaggcgtcccgcaaattggcgtaatagacagccagcccaaaacaggtgacaatcacagcaataatgccttctgccaatagaaaaatcgagttgtcgcgcggcacttcggttccaagcgtaaacaggccccacagccccatattcagcaaatcgccaaaaaccgcaaagaacgagacgcctaaaagaaggaataacagaccctttatccattgtttattgtagaattggcccagaccgggaataattgataatagtaaagcttttttgcgatgctgcaccttctccttcacctctttatatggacgtgcttataataaatggcgccaaacttaagacaagtttgacaccaccgcccgcggcttatttgctgccgctgtgcttcgctttgatctgtccttgtatcgtttccgcggcttgatcaagcgcttttttcggttcggcttttccggttgcaattgtttgcagagccgcatccgccggcgtccatacttcattcatctcaggaatattcggtgtcaactctgagtactgagattgctcggcaacggcttgagccgcttcgctttttgtgacggcaggatcatccgccagttctttgactgcgggaacttcttttgtgatctcatatctcttctttgagttttctttattggcgaggaagacgactaattgttcggctagatcggcattcttcgaataagcgcttacattgtagctcttcacgccgacaaaagaactcatatgcttgccgttggacagtttaggcagcttggcaaccccgtaattgatacccgcttttttgaacggttccaggttccacgggcctgaaatgatcgctgctgcttttccttccgtaaacagcgattccagcacattgatgccctgctccccaataattccggcagggaacagcccctcttggtaaaacttctgaatgtactcggcgccttcgactgcacctttgttgttcaagcctaggtcggccggatcataagtgccgtcggcatcgcttttaaaaatgtagccgccgtaccctcccatgacgctctgtgcataataaatctggtcaaacagcgccaggaagccgaattttttgccgtcagccgtttttttggaatactcataccattcatccagcgttttcggcagttctttttcagaaattaaatctttattatagtagagcatcgtcgtttcgaccgctttcggcaggccgtagaccttgccgtttgtcacctgcgatctcatggcaggttccgtatagatcgattggatctctttgtccacctttaattccttgatcaaaccttccgttaccgctgtcccgatttggtctccgggcatcgttaacacatccggacccgttcccgccggtccatccatccgcaagtcttcgatctgctttgcgtaaggcttttcaacgactttgacagatacgccgtgctctttttcaaattgggcgacggcatctttaatgccttcgcttttctctttatcttcccagaccacgagttccttttgcttcgagtctgatgctccattgctgctctctttaggcccgcaggcagttaaagacaaactgagagcaatgacactgctgattccaacatattttttcatattcatcatttgtctcattccttttattggagtgaaagcgctttacaaaaacaatatagcatgtcttaggaaaagtgtaaacaattattttacttaaacaggtaaaatgttttacgaaaaaagcgcggcttgtgaacagcagcccgcgcttttttaattggtgcttttcctgaccaccagttcggcaccgatatatagcgtttttacagcttttcttttttgaagtatttgttccaaaagcaattcaatagcgtttttgcaaagctctttaatatcgatatggaatgtcgtcagcgggggagatacgtatttcgctacactgatgttgttgatgctgatgatgctgactctgcccgggatggcgatccctttttcatttaaggcctgaaggcagcctacggcaatcggatccgccgctgtaaaaaaggccgtcggcagcttttctcccaatgtttcaactgctttgtccatcagatggtagccgttttccaccgaaaaacccctccggcaaaaaataaagctttcctccaagagccctttttccttcatatattcgcgaaacgttcgttcccttacgtccatttcgtcttcatctgtattggggttgtggtacgtacctccgataaagccgatcttttcatgccctttctcaatgagaaaatctaccgttttcctcgtcatctgctttaagtccggcctcactgaatcaaagtgattcggatcaggcgtcgaatcgataaatacaccgtgaggcgtcatctgtcttaatcggattaattcatcatctgaaaacgagccgacggcaatgaatccttctatgttttcgggaatggcgtcaatgcctcccgaaattttatacgttgccagttcgacgttgaattgctttgcgagcttctcgatttccagcctcatcgttttaaaatacacgtcttcgagctcttccttatccgtcagccagtacagaaacgcgatgttttttaccagtgtcctgatcgttttcttgcggtagttcaggctttccgccacttcaaatattttctcccgcgtctcatcgggtacggaaaggctttcgtcgttattcaatacgcgggaaaccgttgagatggaataccccgccttttctgcaacatcttttatcgtcgccacgattgtaaaacctccatatgaacacctttattttaaatatcaaattttttagtaaaatattttactaatttaacgttgatttgcgtaaaagtcaagtgctgattgccctatccccgccaataaggattttacatgaaaacgcttcatttgaaaaaacactttttattgcaccaatcgaaaacccgtagtaaactggggttgaacttaattaaattaatttattaagtctggtacgtcaaacgaataggaggatatatgaatactgcagccgctttatcaaacgactttcgttctatttttaagacagaaaagacaccgcgaaccttttttgctccgggaaggatcaacttaatcggcgaacacacggattataatggagggcatgttttccccgcctcgatttcatttggcacctatgcccttggcgtgaagcgcgatgatcaaatgatccgcttctattcaaagaacttccctgacaaaggaataattgaatgcagcttgagcgatttagcctttgaccagtccgacggctgggccaattatccgaagggaatgttccttttgacgaaagcggcaggccatcaaatcgttcacggcgccgatattttgtattacggaaatattccgcacggagcgggcctctcttcttccgcatcgattgagcttgcgacaggcgttttgttaaaagggctttatgatttgcagacagacacgatctccatggtgaagctcggacaaaaagtcgaaaacgaatacattggcgtggggagcggcattatggatcaattcgcgatcggcatggggaaaaaggatcacgcgattttgctagactgccgtacacttgattacacatacgctcccttcgtgttgaaagaacacgatgtgatcatcatcaatacaaacaaacagcggacgctggccgggtctaaatataatgaaaggcgcacccaatgtgaagaggcgctcggcgatctgcaacaggagttgtcgatcgcaagcctgggcgaattgacgatggaaggatttgaagcccatcagcacctcatcagaaatgaaatcaatcaaaaacgcgccaaacatgctgtctacgaaaatgcccggacgctgaaggcgcttgaaaaacttcgcgaaggcgacctcgccggatttggcaagctgatgaatgaatcccatttgtcattaagggatgattatgaagtgacggggctggagcttgatgccattgtccaggcggcctgggaacaagacggtgtccttggcgcccgcatgaccggcgccgggttcggcggctgtgcgattgcgattgtagaaaaagaccggacagacagctttaaagaacgcgtgaatgccgtctaccgcgaaacggttggctatgatgccgctttttatactgcggcaataggcgacggcgccaaagaaatatagaaaggggaatggatatgagcgtgttggttttgggcggtgccggctatatcggttcacacgccgtgtaccaattaatagacagaggcgaaaacgtcgttgtcgttgacaacctcgagaccggccaaagacaggcagtacatcctgatgcgatcttttatgaaggggatgtgcgcgatcgcgatttcctccgcacggttttcgaaaaggaacgtattgaagaagtgatccattttgccgccagttcacttgtcggcgaatcgatgaaagatccgctcaaatattacgacaacaatgtatccggaacacaggttttgcttcaggcgatgctcgagcacgatgtaaaaaaaatcgtattctcctcgacggcggccgtctacggagagccttaatcggtgccgattacagaagacatgccgacaatgccgacaagcacctacggggaaacgaaactgatcatggaaaagctcatgaagcggactgaagaagcccatgggatcagctttgtgtctctcaggtacttcaatgttgcaggggcaagggagacgggagaaatcggagaagaccaccgtccggaaacacacctagtccccctcatcctgcagaccgctctcggccaaagaccgcatataacgattttcggcgatgactatgatacgcccgacggcacatgcatccgcgactatgttcatgttgaagacctcattgacgctcatctgtcggcattagactatttaagaaaaggcggcaaaagcgatatattcaatctcggcagcagcgaaggattttcggtgaaagaaatgattgatgcggccagaaaggcaaccgggaaagacattaccgccgagatcggcaagcgcagagccggcgacccgagcatcctgattgccggctctcacaaggcaaagcaagttctgggctggaggccttcgcgcacatctgtagcaaagattattgaagatgcatggaagtggcattcctcgcatccaaacggttacaggaaggaagtgtcaacatgattgaacaagacatagccggactcattcaaaaagcgcttgaagcagggttaatcgaaccggctgacgtgaactacgcgcgcaaccaagtgatgaatctgctgggcttggaatcgtttcctgaggaagccactgctgcttccggcgactccatcccagaccttttggaaaaactcgcagcctatgcagtcgaacacggcgtgataaccgacgatctagacgcgaaagacatgctggcggcaaatgtgatgaactgctttgttgcaagaccttctgtcatcaatgcagtgttccagcagaaatacgaacaatcgccgctggcagccaccgaatatttttatcagctcagcaaaaacagcaactatatccagacgaagcgaattgaaaaaaatatttcgtatcagatggatacgccttacggcacaatggatattacgatcaatttgtcaaagccggaaaaagaccctgaacaaatcaaacgggaacgcgccgctgcaaaacaatcgcgcagctatccgatgtgcctgctgtgcaaagaaaacgaggggtatgcgggacgaatcgggtatcctgcccgggcaaaccacaggattattaaagtcccgctcgccggagaaaactggtattttcaatattctccatatgcttactataacgaacacagcattttattttctgagcagcatcggccgatgaaaattgataagcttgcctttcacaggctgcttgcttttactgagctgtttccgcattattttatcggatcgaatgccgatttgccgatcgtcggcgggtctattttaagccatgaccattatcaggccggacgatatgagtttgcgatgacgcgcgcggaaggcgcgttctcctttcaaatcaaacagcatccggccatcgaagcttccgttttaaaatggccgatgtccgtcatccgcttgaaaggaactgcgatcaacagccttgttgaagcggcggaccatatttttcagacttggaaaaactactcggatcaacaagcggatatctcggcttttacagatggcacgccacataacacgattacgcctatcgcaagaaacgtgagcggcgtttatgaaatcgaccttgtgctcagaaacaaccggacatctgccgagcacccatacggcatattccatccgcatgctgacgttcaccatattaagaaagagaatatcggcttaatcgaagtgatgggcctggccgtccttcctccccgcttaaagaccgaattggcggcagtgaaagaattcctgctcggtcagtcagatgccgttgaagcgcatcaccgggaatgggccgaacagctcaaaaccgaatacggagagatgtccgaaccggagcaggctgaatcaattgtacgaaaagaacttggcaagaaatttgtcaaagcccttgaggacgccggagtattcaaagaccgcgaagctttcatgcgctttatccgcacagtcaatcatcaggggtaaggcttcaccggtgttaaaataggcgaaaaaataagcttattttagcaccggatcaaacagctccgccagcagcaatgaaacggctccgtaaagcgtcgcttcatcgccgagcttcgttatcgtcacttctgtctgcctcgcttcggctgttaaagctttctgctgtatcgtttctcgtatcgccggcaatatgaacctcccgcccttcatcactcctcctcccagcacgattttgcccggattgacaagatgaatgaaattggtcagcccgattccgatgatcacaccggtttcctgaaaaagttcgatacatgtttggcagccgttctcggccatttcaaacaaatctttggctgtcaggctgtcagtgctttctttcaaccgctttttcccccgttcggcaattgcttttccgctcacaatcgtctgcaggcagccgcggttgccgcactcgcacttttctccattgatatcaatgatcatatggcccagttcacccgcgatcccttcagctccatggtacagttttccgttgatgacgatccccgcaccgacgccgcggccgatattcacggcagccatgctccctgcgtcatcgcggccgccgaaccacgattcgccaagcgccatcgcccgggcatcgttttcaactcttacggttaagttgaattcttgttccagcacatctttgatggggatattggttaagtttaaaatcggtgcgatgcgcgacattcccgtttcagcatcgaccacaccgtgcattgcaatgccgatcccgatgatcttttcttgctcgacatcggcacgtcccaaaatggcatagacactttcttttaaaacttccatgaacctctcgtttgtcagcggttttttcagcaggctggacgtccgctgcaaaatccctccggctaaatcggttaagacgcactccaccgtctcaggcccggcatcaatgccaatgacataataggcacccgtgttgatgtggagcatggtcggctttcttccgccgctcgaatgaccgagcgtgctttctttaacgagtccttgtccgatgagctctttgacgatgcttgagaccgtgggaggggtgatctttgtttccttggcgatctcagctctcgaaatcggctctgatgttctgattttattaagaatgatcgatttgttcaccgatttcattaattgaaatgtaccgcgctgcatgtgaaatcctccatttacaccatatcgtaggttttattgtaccatggttaattaattaaattaacaaacgaaaacaagataggtgtttccgaaggctttgtacaacattgccacagaaatggtcaaaacataaagggcacctgctccctttacttttttgcttcaggggggctttcaaagcgcttctgcaaaacaaatggtttctaaatggaaaaatttttcgaaaaatttaaaatgaaagtgtttgcataatcaaaataatcgcgttatcatacttgtatacaagtatactcgtataactaggaaggtgagtgtatgagcgaatctaaaggccttttatatccggagaagtggctttctagagcttcaactggtgttcgcgtcgcatgcgagctgagaatgcgcattatttccggtttgattgaaagcggtaccattttatctgaaaataaattggctgcggaattctcggtgagccggtctcccatccgcgaggctttaaaaatactggcatcggaaaaaatcatccgtttggaacggatgggggccgttgtcatcggtttaaccgaaaaagaaataggagaaatttatgatgtgcgcctggtgatggaaacattcgtattcgaacggcttggacaggccaatgtcgacgaactggtaacagacctcagcaaaatattggagatgatgaaagtctccatcaaatacaaagatgccgacgagttctcatttcaagacgtcttatttcacgaaacgattgtccgctccatcaatcattcttacattttgatgatatggaacaatctcaaacctgtgatggaaagctttattcttttatccatgcgggcccgcttaaaagaaaaatacgaagactttgaacgaattctcgataaccatgaactttatattcaagcgatcaaaacgaaagacagggatctgatgcttaaatccctacatcaaaatttcgatgacgtacaaggtaaagttgaagatctatggctgtcgcaacaaatgctggcgaaaggagccgaacaacaaaatgactagttatatgttaggcatagatatcggtacgacaagcacgaaagcggttttattcagtgaaaaaggggacgtgatccaaaaggaaagcatcggctacccgcttcacacgccggacatctcgaccgctgaacaaaacccggatgagatctttcaggccgtcatccagtcaacggcgaaaatcatgcagcagcatcccgacaaacagccgtcattcatttcattcagcagtgcgatgcacagcgtgattgcgatggacgaaaacgacaagccgctcacctcctgcatcacttgggcagataacagaagcgaaggctgggctcataaaatcaaagaagaaatgaacgggcacaatatctacaaacggacgggaacgccgattcacccgatgacgccgctaagcaaaatcacgtggattgtgaacgaacatcctgaaaccgctgccaaagcgaaaaaatatatcggaatcaaagaatatattttcaaaaaactatttgatcaatatgtcgttgatcactcattagcttcggcgatgggaatgatgaatctcaaaaccttggcctgggacgaagaagcacttgcgattgccggcatcacgcccgaccacttatcaaagctcgttccgacaacagcaattttccataattgcaatccggaactggcggcgatgatgggaatcgatccgcaaacgccgtttgtcatcggcgcaagcgacggcgtgctgtccaacctcggcgtcaacgcgattaaaaaaggcgaaatcgccgtcaccatcgggacaagcggcgcgattcgcacgattatcgatgagccgcaaaccgatgaaaaaggcagaatcttttgctatgccttaactgaaaaccattgggtcatcggcgggccagtcaacaacggcgggatcgtccttcgctggatcagagatgaatttgcttcatcagaaatcgaaaccgcaaaacgcctcggcattgatccatatgatgtcttgaccaaaattgccgaacgcgtcagaccgggtgccgacggactgctgttccatccatacctcgctggcgaacgggcgccgctctggaatccggatgtgcgcggttcattcttcggcctcaccatgtcccataaaaaagaacacatgatccgcgcggcattggaaggggttatttacaatctgtacaccgtcttcctggcgttgacagaatgcatggacggtccagttgcccgaattcaggcgaccggaggcttcgcaaggtctgatgtgtggaggcaaatgatggccgatattttcgaatcggaagtcgtcgtgccggaaagctatgaaagctcttgtctcggagcctgcattttgggactgtacgcgacgggaaaaatcgattcgttcgatgtcgtctccgacatggtcggaagcacgcacagacacgcgccgaaagaagaatcggccaaagaatacagaaaattaatgccgatctttatcaacttatctcgagcactggaaaacgagtatacacaaattgcaaattatcaaagaagcttaaccagcaaaaaataggggaagaattggaggcgttatcatgccattattaatcgtagcaatcgggattgtcgcattattgcttttgattatggggttaaaactgaatacgtttgtttccttgattatcgtatcgttcggtgttgcattggcacttggaatgccgtttgacgacatcgtcaaaacgattgaacaaggccttggcggaacgctcggccatatcgcattgatcttcgggctcggcgccatgctgggcaagctgatcgcggattcagggggcgctcagcgcattgcgatgaccctcgtcaacaaattcggggagaaaaacatccaatgggcggtcgtcatcgcctcctttatcatcggggttgctttattcttcgaagtcggattggttttattgattccaattgtattcgcaatttcaagagaattgaagatttctattttatacctcggaattccgatgacggcggccttatccgtcacacacggcttcctgcctccgcatccgggaccgacggctatcgcgggagaactcggcgccaatatcggggaagtgctgctctacggtatcattgttgcaattccaaccgttcttttggccggacctttatttacgaaactggcgaaaaaaatcgtaccgcaatcatttgagaaaatgggcagcatcgcttcactcggtgaacagaaaacgttcaagcttgaagagacgccagcctttggcatcagcgtcttcacagctatgcttccagtcattatcatgtcgatttcgactattattactctcattcaagaaacaatgggacttgcagacaacagcttcctggcagcgattcgtttaatcgggaatgcctcgacttcgatggtcatctccctgttgttcgcgatttatacgatgggtatcgccagaaagatcccgatcaaacaagtgatggattcctgttcaaccgccattactcaaatcggaatgatgctcttgatcatcgggggcggcggcgcattcaaacaagtcttgatcaacggcggagtaggcgactatgtagctgaattattcaaaggaacggccatgtcgccgatcttgctcgcctgggtcatcgccgcgattctgcgaatctctttaggttccgcgacagttgctgcattaagcacgaccggactcgttcttccgatgctcggacaaagcgatgtcaatcttgcactggttgtgcttgcaacaggggcaggaagtgtaatcgcttcccatgtcaacgacgcgggcttctggatgttcaaagagtatttcggcctgagcatgaaagaaacattcgccacctggacactgcttgaaacaattatcgcggtggccggattaggatttactttattgttaagtctatttgtataaaaaagttttagtgaaggagcaggtactacatgtgcaatacaatcggtgtcataggtttgggggtcatggggagcaatatcgccctgaacatggcaagcaaaggcgaacaagtcgccgtctataactacacaagggatttaaccgatcaactcgtccaaaaaacgggaggccaaacagtcaagccatactatgagcttgaagatttcgtacagtctttagaaaagccgcgaaaaatctttcttatggtcacagcaggcaaaccggtcgattctgtcatcgactcgctcgtccctctgcttgaagaaggggacgtcatcatggacggcggcaactcccactatgaagatacagaacgacgatatgacagtttgaaagtgaaaggaatcggctacttgggaatcggcatttccggcggcgaaatcggcgctttaaaaggcccatccattatgccaggcggagaccgggacgtctacgaaaaagccgctccgattctcacaaaaatcgccgcccaagtggatggagatccatgctgtgtctacatcggtccgaaaggcgcgggtcattttgtcaaaatggtgcacaacggcatcgaatacgcagacatgcagctcatcgccgaagcatatacgtttttaagagaaaagcttcttttgccgatagatgaaatcgctgacattttcgacacgtggaatcaaggagagctgaacagctatttaatcgaaatcacggcggagatcctgcggaaaaaggatgagaagacgggcgctccactcatcgacgtcatcctcgacaaaaccggccaaaaaggcacgggcaaatggacgagcctgcaggccgtcgacaacggcattccatcatcgattatcacggaatccctgtttgcccgttacctgtcatcattaaaagacgaacggacagctgcggaaaaagtattggccggacctgcaacagaagaacggcgcctggatcaaaacgtgtggatcgaccgcgtcagacaggcattatatatgggcaaaatctgcgcctatgcacaaggcttcgctcaatacaaaatgacatctgacctgaacggatggaacctgccgttaaaggacatcgccctcatcttccgcggcggctgcatcatccgcgcacaatttttaaatctcatcagcgaggcgttcgacaaacagccggacctgtccaacctgctggtcgcacctgacttcgctgaaaaactaaaagaataccagtccggcttgcggaaggtcgtctgcgaaggcatcagctcaggcatctcattcccgtgcctaagcactgccctttcctattacgacggctaccgcacaggccgctcaaacgcaaacctcctgcaggcccagcgcgattatttcggcgctcacacgtatgagcggacggatatggaaggcgtgtttcatacggactggtattaaaaactgcaccccggatctcggggtgcattcttatttcactcaaatggattttcatactttgttcaacatttcacaaacttatatttcaaattcgtgctatgataaattcaacaacagaaaaggaggattgatgccaaaataaaccagatatccgcttcagggataaaaatttttaacctaacttgtgaaatgtttcacaaactttaccgacttcattcatccctggacatcctgttgtaatcaaattcctattcattcactggagggtttacaatggcaatcgaagaaaagaacatgaaacaaaagcaaaatgcctcaaacatgattgatcagctagtcgaaaaaggcctaaaggcattggaagaattccgcagctttgatcaggagcagattgatgagatcgtcaaacagatggcgcttgccggccttgatcagcacatgcctctcgccaaacttgccgtcgaagaaacgaagcgcggcgtttatgaagataaaatcattaaaaacatgtttgccacagagtatgtctaccatcatatcaaatacgataaaacagtgggcatcatcaatgaaaacgaacacgacggagtcattgaaatcgcggagcctgtcggtgtcatcgccggcgtgacgccggtgaccaaccctacttccaccaccatgttcaagtccctgatatcaattaaaacaagaaatccaatcgtgtttgctttccatccatccgcccaaaaatgcagccgcgaagcggcgagaatccttcgggacgcagccgtcaaagcaggagcacccgacaactgcatccaatggatcgagacgccttctctggatgcaacgcaagccctaatgacccacccgaacgtttccctgatcctcgcaacaggaggcgcaggcatggtgaaatccgcttacagctccggaaaaccggcccttggcgtcggacctggaaacgttccgtgctacatcgagaagtctgccaacctgaagcaagccgtcaatgatctgatcttatccaaaacatttgacaacggcatgatttgcgcatcagagcaggccgtcatcatagacaaaggcatctactcagacgtcaaagccgaaatgacaagaaacaactgctatttcttaaataaaaccgaaaaatcaaaggtcgaaaaattggtcatcaatgaaaatacttgcgcggtaaacgctgatatcgtcggcatgccggcattcaaaattgctgaaatggccggtatcaaagtgccgcaagatacaaaaatcctcatcgccgaattagaagatgtaggtccggatgacccgctgtccagagaaaaactgagccctgttttagcgtgctacaaagtcagcgggcttgaagaaggattaaaacgcgccgaagagatgctggcgttcgggggaaccggccactcggcggtgattcatacgaacgatcaagaagccgttaaagaattcggcttaaggatgaaggccggccggatcattgtcaatgcaccgtcgtcacaaggagcgatcggcgacatttacaacgcctatatgccttctttaacgctcggctgcggcacatatggcgggaactccgtctcgtcaaacgtaggggccgttcatttaatcaacacgaaaaaagtggcgaaaaggaatgtcaatatgcagtggtttaaagtgcctccaaaaatctattttgaaaaacacgcaacccaatatttagcgaaaatgcctgacatctcaaaagcgtttattgtgactgatccgggaatggtgaaactcggatatgtagaccgcgcccttcactacttaagaaggcgcccggattacgttcattgcgaaattttttctgatgtcgagcctgatccttcaatcgaaacggtgatgaacggcgtcgacatgatggccaaattccagccggatgtcatcatcgccctcggcggaggttcggcaatggatgccgcaaaaggaatgtggatgttctacgagcaccctgatgctgaattctttggcttaaagcaaaaatttctggacatccgcaagcgcatcgtcaaatacccgaaactgggaggaaaagcaaaattcgtcgcaatcccgacgacatcaggcacaggttctgaagtcacttcattctctgtcattacagacaaagaaacgaatacaaagtacccgctggccgattatgaattaacaccggatgtcgcgatcattgacccgcaatttgtcatgaccgtgccgaaacatatcacggccgacacaggaatggacgtattgacacacgcaattgaatcatacgtatcgtgcatggccaacgactatactgacggcttggccatgaaggccatccagctgatcttcgaatatctgccaagagcatacaaaaacggcagcgacgagctggcccgcgaaaaagtgcataatgcatcaacgattgccggaatggcattttccaatgccttcctcggcatcaaccacagcttagcccataagcttggcgccgagtttcagatcgctcatggacgggcaaacgccatccttctgccgcacgtgatccgctataatgcagcgaagccgaaaaagttcacggcatttcctaaatacagccacttcatagccgaccagcgctacgcggagattgccagaacgctcggcctgcctgcaaaaacaactgcagaaggtgttgaaagcctcatccaggagatcatctcgcttgccaaagagcttaaaattccgatgagcattaaacaaaacggcgtggatgccgccgcattcgaaagcaaagtagatctcatggccgagcgcgcctttgaagatcagtgcacgacagccaatcctaagctgccgctcgtttcagagctggctgagatttaccgttccgcgtataaaggagtttagccaaaaaagccgtcattccgacggctttagtttgttgacaaaatcccaaaacgacttttagttttgggattttgtcatcctttcagcgtgattgaaaacccttgcagtctaggaaggccgagcatcggagcgcagcgaatgttggaattcgtgagcaccgacgcgcaggcctgacaacgaatgcgaggatttgtcgacacgctgaagccgtcattccgacggcttttctttattttcaattaggcctctttattctcacttctctatcatttgtgccaatcatactatatgaaaatgaaactccaactcttttctttagctgaaatacttaacaaaaaaataaaggtctttccccttgacaaaaaatatttattatttgataatttgtatataattataataattatagagaaataaagtttacaattttatttctcttaaactacattcaggaggacgatattatgtctctaatcggaaaagaagtacaaccattcgcagcaaaagcttacaaaaacggtgagtttatcgatgttacacacgaagatctgaaaggccaatggagcattttctgcttctatccagcggatttctcatttgtttgcccgactgagcttgaagaccttcaaaaccactacgaagctctaaaagaactaggtgtcgaagtatactctgtttctacagatactcacttcgtacataaaggatggcatgacagctctgagaaaatcggcaaaatcacttacgcgatgatcggcgacccatctcaaacgatctcccgcaattttgaagtgctgaacgaagaagaaggtcttgctgaccgcggaacattcatcatcgatccggacggcgtcatccaagctgttgaaatcaacgcaggcggtatcggccgtgatgcgagcatcctgatcaacaaagtaaaagcggctcaatacgtacgccaaaacccaggcgaagtttgcccggctaaatgggaagaaggttctgaaacactgacaccaagccttgacctagtaggcaaaatctaaggagtgcattcaattggtacttgaagcaaatatcaaagcacaattaaaccaatacatgcagatgattgaaaatgacatcgtccttaaagtcagtgcaggcgatgacagtgtctctaaggatatgctggctcttgtagaagagctggcttccatgtcatcaaaaatcactgttgaaaaggcgcagctcgacagaacgccaagcttcagcgtcaatcgtgccgaagaagatacaggcgtgacattcgccggggttccgctcggtcacgaattcacatctttggtgctggcactcttgcaagtaagcggcagaccgccgaaagtcgatcaaaaaatcatcgatcaaatcaagaacatcagcggcgagtaccgcttcgaatcttatatcagcctcacatgccacaactgcccggatgttgtgcaggcattgaacatgatgagcgtgctcaacccgaacatctctcacacaatgatcgacggtgcggcatacaagtcagaagtcgaaagcaaaaacattatggctgtgccgaccgtatacttgaacggcgaatcctttggaagcggccgaatgacgcttgaagaaattcttgcgaagatgggcagcggcacagatgcgtctgagctttctgataaagaaccgttcgatgtactcgttgtcggaggcgggcctgccggcgccagcgcagcaatctatgcggcgcgcaaaggcatccgtacgggaatcgttgccgaacgcttcggcggccaagtccttgacacgatgagcatcgagaacttcatcagcgtgaagcgcaccgaagggcctaagcttgcggcaagccttgaagaacacgtgaaggattatgatatcgacgtcatgaacctgcaacgagcaaaaggcctcgagaaaaaagaccttttccatctagaactcgaaaacggcgctgttctgaagagcaaaaccgtcattctttcaactggcgcacgctggcgcaatatcggcgtacccggcgaacaagagttcaaaaacaaaggtgtcgcatactgccctcactgtgacggaccattgtttgaaggcaaagacgtcgccgtcatcggcggcggcaactccggcatcgaagcggcgattgaccttgcaggcatcgtcaaccatgtgactgttcttgagtttgcgccggagctgaaagcagacaaagttctgcaaaaacgtctctacagcctccccaacgtgactgtcgtgaaaaacgcccaaacaaaagaaatcacgggcgatgaaaacgtaaacggcattacttacgtagaccgtgaaacaggagaagaaaaacacgtcgagctccaaggcgtcttcgtccaaatcggtcttgtgccgaacacggaatggctgcctgaaaccgtcgaacgcaaccgcatcggcgaaatcgcagtcgacaaacgcggcgaaacaaccatccctggattgttcgctgccggcgactgcacagacagcccgtacaaccaaatcatcatttccatgggatccggagcaaacgctgctttaggcgcgtttgactacctgattcggaattaatctataaaaaacgctatgctgaagttttcagcatagcgtttttctgtattcccgcaaccacggctcattcgattttggcaatggaagcatccctcaagcagcgcacctcggcacggaggcgccctctttgtagtcataaccccttataatagaattcattttctcatcttctttaatttggtactataaatatagtagttttaatattagtcatcatgaatagaggttacttgaaatgagaaaagaacagtcttttatgaactcaactgctttctttatcatcatttgtatgttaggcgggatactttttcttttaacgaagtgacatgaactttagatctatattactgagaagtatacgtataagaagacattagtccacgatgtcatatcaacttatatcagccatctcagcttatcaggtttttccttcatgcagttgaacgtggaagaagcgaagtactttgaattggagacttaatcgcccaagcattacattcgagcattctttcaattgatgaacagcctcagttttgataagcgaaaggccggcgtcaatacaaccggccttatttctgcggcacctcttttaatgaaccaacccatacagttcctgcgctcactttataccactcatcttttccgtcattatcttttgaataggacatttcttttatgcgcagcacatcgccgctgcttctcaatcctagttcgaggtcctcctccagatcagatagccggtaatacacggtatgaatatgaggttcccattcaaatgcattcagctcatgttctaaaggttcgtatattttcaaagagaacgcttctttttcttcttgcttgtcgaaagaaccactgtaaaaatcaatcgcttctttataagcagccacaatttgtgaacggataaaatcaggctcatacaaccaaattttcaagtagaaatcttcattttcagctttcaattgcttatgccattcatgatagacatcgatcatcgcctccaaaagcaagcgtttataccataatggaggagtcactgtttgaagcccgtaaaaaggggatatccataatttaacgtaatctctatgatgatctcttaaatattccatattcaattgaatattgtctgatttccaccattctattcttcgtttcagtcttttccagcctcttatttttttctttgccgaaaaatacatattgacctcccttcgcgtaacaaaaacggcgcaagagaccgcccccttgcacctaacaacacgtcatttacttataataattataatcattaaatgtcgcgatcatatcgttttgcgtcccgctttttccgcgattcgtattaaagtaaagcgtcccgtcatcaaaatcgacagcctctatttcaaaaagcgtgtatgcactgctggtaattctgaaagataaatcgctgcgagtaaacaattccttcgaaaagtcctgaatcgggtttgttttttgctctttaatcatttcattgatatttaaagggtacgtcaatataatgctcacatttgaagcattgccattgctgtccggttttgtaagcggcacatacaatgtcccctggtaaaaggaaattccttgctgaatgaaatgcgaaacatccattgtctgatgattcacaacagctttcgaatagtttaatttaaacgttgcttcatagtcgaattttccggttgtatcattgaatgtcccaataaagaacctttttcccgatcttacgataaatttatccgtcccaaccgagtatgtgataccgccaatcgacaaattcgaaccttgataattcagcacatatgttttagccactttataagtatttttcgttgtatcgacgctgagcttcacgattttattggcatacttagtgccgtcagacatcggcgccacataaacgctgacgcttttatcgcccgcagatgctttgacagccaagtcattggcgtgccctaaatcatagctcgtagtattggtatccgaatttttaagaagtgcaacggttctattgcttgccgtaccgctcattttcacagagaataactgcgtcgtgtgattcgtgttattcaattttgcagcgtagatcacattgttattgcggtcgacgcacatcccctgcatcgccgtgaaataccccgacttagacatggaaacataatcggtatacgtattaaagtagcctgattgcgcatatgcagccgtccccgcaaagctgctgagagctaagataaccgctgctatgaaaacttttggttttttaaacaccatgccatccccccttaaatgatttccatattatatccttgaaggaatattgcgtcaatataagattgatgtccccctcctttctatgcaatatgccctcagaaagcttcctgtttgttaaaatttagattaatttatcataaatatggtactattattttaaaaaagagattcagaggctgaaacaatgaatgaacttgtgtttgaaaagagagaatttactcaagaccatgtgaatgttgtaaaagcaatgcatataaataactatccgattgtttatatcctttataacgagaaaaagaaaccgactgcatatattggacaaacggttcaagctgcacggcgtttgaaaaatcatatagatgatgaaaagcgaaagagtttgaatcgctttattttaatcggccatgagaaatttcatcagtctgcgacatacaatattgaataaatttaattaactattttatcgccgataaccgctaccagctgcaaaacgtaagccagaccaggtctagggaaatgcacaattactatcagaaacccttttataatgaaaatatctttcaagtcatttgggagaagctgagaaaagagaaaattgtgaacgattctctttaaaaccttaggaataaagacatttataagttatctccttataaagagctctcgcctcagcagcttgatattaaaaataagatccttgatttctgtaaagaacgtatacaaaaagaaggaaatcatgtcattgttattgaaggagatgccggcacaggtaaaagtgtcctgttaagctctctgtttaatacgattcaagatttggctaagagtgaagactcttttttgaaagaaacagataattacttgctggtaaatcacagcgaaatgctgaagacttataagagcatcgccaacagcttaccgaatttaaagaaaaagagtttcatgaagccgacaccatttattaatgagaagaccaagacgggagcaacagcggatatcgtattagtagatgaagctcacctgcttctgacaaaggaagattcctataaccatttccgctaccaaaaccagctgtatgaaatcattaagcgaagtaaaatcactgtggtgatctttgacccaaaacaagtcttaaagattaaaagttattggaacgaaagattgctcgaggaaatcattaatcagtatgatgcgaaaaccgtaaaactgacagaccaaatgagaatgaacgccaatccagaaacaatcaagtggattgacagctttgttgaaaagaaagttcttccctttccgactgaagactcctccttcgagcttaaaatatttgaagatgctgctgcgtttaaaacagctattgaacgcaaaaacagtgaagacggtctctcccggattgtctcgacctttgattatttacataaaaaagataaaaagacttacatcgttgatgaagaagggattaacatgccctggaacagcacccaagataaagtgacatgggcggaaaatccgaattctattaaagaagtcggctccatttataccgttcaagggtttgatttaaattacgtcggcgtcgttctcggcccttccgtaagctatgatgaagaaaaagacgaactggtaattgatacttccaaatacaaagatacaggggcattcgtgttacgtacagatttgtctccagaacagaatgaacaaattaaagaacaaatcatcctaaattcaataaatgtcctgatgaagcggggcatacaaggcctctatatttatgcgacagatcctaaattaaaaaagagactactcgagttagaaaggggaaaatggtcatgaacgatatccaaagcctgatcaacgcaatcaacgaattcagagatgaacgaaactggaggcaataccatacccaaaagacctcgccatctcaatttccatcgaagcagcagagctgctcgaagacttccaatggatcagcagtgaagaagcactcaaagcaaataaagaaacatccgtgaagaaatcgcagatattttgatctactctttcatgctgtgcaacgatcttggattggacgtgaaagagattgtggaagagaagattgtgaagaatgggaggaagtatccggttcatcataatggttaagaatctccttttaagtagagagagcttctttcacaattgaagaccgctctctctatctccatgatgcgttggttattatggcatcctgctttgttatcttaccgtaacccctccacttcatatgctttaacaccctttgattctttctgcaccgttcgctggctccctgttatttttgaaaaaatgacatttgtcatccgattttcatgacatcacttactaaaatccgcctccctcaacttatacaatgaaatgagtaaatcaggaggtggcctgtagccatgagcaatgttgtaagcttgacgaatgtgacaaagacattccgccaaaaaacggcggttgatcagatagatttttcaattaaaaaaggagaaattgtagccattctagggccaaacggagccgggaaaacaacaacgatttcaatgatattggggctgttaaaaccgacggctggcaacatcacattattcgattccatgccgcatgaaaaacgggtgcgtgaaaaaatcggcacgatgctccaggaagtcagcgtcatgcctggtttgcgtgcaggtgaaatcatcgaactcatccggagctactatccaaagcctctatcctttcaaaagcttagaacgttgacaggtttgacagacaaggatttaaaaacacaggcagaaaagttgtccggcgggcaaaagcggcgtctaggctttgccttggcacttgccggcgatccagaactgatgatctttgacgaacccacggtcggcatggatatcacttcaagaaaccgcttttggcaaacggttcaatcgctcgcagagcaaggaaaaacgatcattttttctacacactacttacaggaagcagatgatgccgcgcaacgaatcttgctgtttaaagacggcaagatagtagctgatggaacgccgctccaaataaaatcaagaatatcgaagcattcggtttcatttatagttgatccggaacagtcactcgagaagctgtatcagcacccagaaaccgaacagatttttcgtaaaaacaaccgggtttacatcgacacggccaatacggacaaaatactggaactcattttctcagaaaagatcggcgcttatgatattcaaattgagcgcggaaatctcgaagaggcatttcgccagctgacaagcaaaggagacgagtaaaatgaatgtatttcagatgcagtgcagaatggaaatcaaaagaatgcttcgaaaccgctattttgtcttttggtcattggccatgccgattgctttttattatatttttacaaatgtcgtcaatacgaatgctccagaccctgcggcatggaatgcgcattatttaatgtcgatgacaacattcagcgtcatgggctcttcgatcactcggcatccgcatggttcaagaacgcacccaaggctggtcgacgttcatacgcgtaacgcctcttcccgaccacatttattttatcgctcaaatgtcggggcaaagcgtcattcatattctttcgatcacagtaatcttcttagccggcgccttgatcaacggcgtttctttatccccattggaatggttcctgtgcggattgtgggccctgcttggctcgctcccgtttctggcgatcgggacattgatcgggatgatgaaaaaagtggatacagcagccggaatcagcaatgtgctgtatatggggctcgccgtatgcggagggatgtggatgccgcttgaaattatgccaaaaatgatgcagaatatcggccattggctgccgtcctatcattatggcagcggcgcctgggaaatcgctcgaggtcaaatgccaaactggaaaaatattctcttcctattagcctattcaatcgttattatgctactatctaaatatataagaagaaaacaagaagcggtgtgaacaagaatgaaaaaaaacttcagcatgtttccgaaacggtacggcttttttccttatatctttttaatctatttactgctgcccatttcttatttgacaaatcagacctcgggaatcaaacagctgatcggttttggactcgtgctgcttttcttggtgacgtaccgccagcttttttttattccgccgcaaaaaaaattatttacttattggctggccatccagctttcaatcattttaatctacactgtattttatgatatcaacttagtatttttaggctttttttcagcgaactttatcggctattaccgggaaaaaaagacgttccggtgcggccttgccagcctggttgttgtattggtcgccccttttatctatcatctgctgaaagatccatccctgcttaatcggctcttttattttctgccctttcttgtgattatgctcatttcaccatacggcatccgctccatgaaccgccgcatggaactggaacaaaagcttgatgaagcaaatcagcatattaaggaactggtcaagcgcgaggagcgtgtacgaattgcccgcgatctgcacgatacacttggccatactctttcactgctcacattaaaaagccagcttgtccagcgcatcatcgccagcgcccccgaacgggcgcgaaaagaagcaagagaaatggaaaccacatcaagagcagccttaaaacaagtccgggaactcgtgtctgatatgaaaacggcaactattgcagaagagctcatccacatccagcaaatcctgcgggctgcagacatcacattcgaatacatgggaggttccgatttttcaaatatccctcctgtcacacaaaacattgtcagcatgtgtatacgcgaagccgccacaaatatcgtcaaacacagccgcgccacccattgcaccatttccatctctcaaacagatgataaaataagcattaccatcaaagacgacggaatggggatggatcagcaaaaaacaccatttggtaacggcttgcgcggaatgaaggaaagacttgcattaatcgacggcgctctcgacgtttcaacccatgacggcacagttttaagcatcgccgttccaaatgtaaagaaagctgaaggaaaggaagcaatccaatgattcgtttatttattgccgaagaccaaagaatgctgttaagcgcgctgggatccttgcttgatcttgaagaagacatggaagtgatcggccaggcgacaaacggcgaagaagcgctcaccgccattctgaagctagaaccggacgtctgcctcatggatatcgaaatgccggtcaaaagcggactggaagtggccgaagagctcgcaaagcaaggcgcaaaaacgaaaatcatcatcctaacgacgtttgcgcgtcccggctacttcgaacgcgccgtcaaaagcaatgtccacggctacctgctcaaggacggggaaatcgacgatctcgcagacgccatccgaaaatgcacggaaggcaaaagaacctttagtccggaacttaccttcaacgctgtccgcgaaacaaacccgctcaccgaacgcgaacaggacatcttgcgactggcatatatcggaaagacgacaaaagaaatttctgaggagcttttcttgtcgtcagggaccgtccggaattatatttctgagattatgcagaagctggatgcgaaaaaccggatggaagcggcaaggattgcggaggggaaaggatggatttgagtggggtcttgagataagcagccatcatggtacaatggtattttaggagctttgacattggccttatagcttatcaactaactccttttaacattcacactcctgttttaagaggtatttccttagtcgattaattcaccagaatattcttttggttgttcaatgtcgctcttttctctgtatcactcagtgatataccttgtttgattggagtccaatactcatatgcatactcggtatcccattcaatccatttagaaactaccttactaaaatctcgtacctgtgttgacatatcaacggcttatcttatacatactcttaatatgattaagctctgtcttctcctctccttttcgaaatcaatacaaccattttcttcaactatttttattagtccttcttgaaacgattgacaatattcagcttcttcatttataagcttttgattaaaaatactattcagaaatttctctttcctatctgtaataatcaccgtataactaatcgaaaattatttcgctcggaccaaccagggtgccgtcatgatcccgggcgaaagacgaacggtccgtgacgtcaagcacggaccgaccgccaattgtactgaaacgccctgggcttcatccgacatcttacctccggtcaaattcgccgtttgctggctctatcaaaacaccaacgtacagcaaacagatgactcagcggcacaacaagcaacccatacaccgcggccactagtacagcccctatctcatcaggcctttggagcaaaacaacaacgcccacaaggccgaccccaacaagcatttctttggctacacggctccggagaatccgtacccatgactggcctgccacccgcagcggaaagtcacgcttcgcctgcagcagcgcggttatcaatgcactaatcgcagcagcgacagtgaaagcaataactaatgcaatcagcgcaagattcaacaaccatacaacgtacgctgcgaactgcgcgcggagaatcccctcttcggcaacatagacaactttcagttcaccgttgatatctcgatcacgcagtgccttcacgtcaaggccgtgtttccctaacaattcctgcgtagcagttacaccagtgaatacgatgttgctacctgagaccatggaagtcaaagcagaatcgttataagtatcgtagagcgagggcacgacaacaactaggacatcgtccgcaaagtgaagtctttcccctcctcctccttgggctaccggcaaccggaatccgtcgatcggccgcaagaacttgaacttaccgaactgctcatcggaaagctctttcctcgacaaaagctcggcctcttctcgaatcattttgacaagcccttttggaatgctatgataaggcacctttgtaacagcaggctgtggtgcatccatggtcaccatatcaagccaacgctggttcacgtaagagatggccgagtactctccaaaatcggctggcattggcatttcttgagtatatgtgtaggaaaaagctaccttatcaagcgattccgcatcctttaccagtttaccaatcagcggctccatgtggttcatctcgtcaacgtctgtcgcaaacacaatcgcaacttgatctgcgagtttcttccactgagccatttcagcagctatagctgaggaatgtttgtatgcggaccaagcaggtccagccgcagctaccaccaggaggaacgttaacgcctggatcacgatggcagctgaacgcaagcttttaacagcaggttgtctggtggcgatcatggtagcgctaggccatgcggaagctgacatgatcagcgtagccaacagggatacggtaataacagcgacctgcagactgaacagcgcattgaggaaggtaccgacatatatccagccatgaaacaaacctacgtagcaagacgcaaccagtgctacagccaccgccgaaaccagcagcgcccccccgaacccggccaggtcctgaacctgaatccgcgaggtcgggcacccgcccagaacccgaagagcacgcccacgcgctcttaacgacaaccagaacaacgcaagcgccgcaatcagcgcaaatgctgcaagaacagcggcagcaaatcctctttctcgcacaacgaattcaaggcttttaaaaatggacgcatccccgcgaccgaccttcacgccttcacttttcagcgtgtcctcaaactcgctcaagtgagccttttcaccggtcacgagatagaacccatcggggtaggaggtttcaagccggtccttaccgacaatcttgcctgcaccatcgccgccaaaccaagtaaattcgtcgggcagatctctatcgttaagtgctacgtagacctggccatcgccgtcgcttgcaaggtctggcgcaaccttgaccagcccaagattccagcgtgcatcgagcttctccagcttcgcaaacgcttcagtaatagaaagccccgattcgctgaaatcaaggtttaacctgctctcggcaccaatcgcctgaggaaagtctcgatcatataggtcggtgataatcgccgccagtagcgcaagcagagcaaacaacgcgcccgcgacagccactataatacgtttatacacaagctggacctccaagaactatttgaaaattgccatgctaagccccggcgaacacaaccggtatcgccggggactggcgtaattgcctggattaacagataatgttcccccttcatttcattcctcctcatttattcaactatttttgtcaatatttctgctcctcaactcgtttgtctctgcctccaatcaatcctccaagggctcatatgtaaagcctagccagcgcctcttgcttggcgtagttggtctgcatcaggttcatactgcttgacaaaaacggggagccagtcttgccgtaaacagcaggaaacgattacaccgagtgaattgtgtagaagttgagttagcgcttcaccaggtgcactgggaccccaaacccgtcacggcggctgagcaggtcggagattgcgtcatgctcggatcttgaaccatagctaaccatgaccagccctcggttctcgtcatcaggacacggctttcctacttcgaccgtaatgtcatcacccaaagctttaatctcctcgacgaggtcttgatgtctggaaagcgctgcattggcctctgttacgttcggcagctgatcgcacggcggatgagtgtctcttgacactgtgatccatccgtttaggaatgcaattgttccaactgcaagcaataatcctatgacgacaccgataatgatcttcgtggttgatttcatgagttacctcctaagttgccgggatcgttggtcgacaatggttttgacgaactgctggaaccgaccttatgccgagcaccacacgcgttgatcatctcagagtcgtgcgtagacacaataaccgtgcggccacgcgcagcgaagtccgcaaacagatcgataacctttcgccgattggttgagtcaagcgaggcggtcggctcatcgacaaacaagaatgcagcgtccttgtagatggcacgagccagtgcgagtcgctgcttctcgcccccactaaggtggctagccaactcgccttctcgaccctggagacccgtctgctcgagcacctgcgccaaccgctcttggtttcccgtgacacgccgcccaaggatgctcgcctgcatggtgacattgaatgccaccgactcctcatccataatgccgtaatcctgaagaatgaacgccgcatgatcacgccaaaaccgccgccgcgccgcagtaccgtagcttgtgacatcgtgtccgtctatcaagatgcgtccctgattaaccgggagcaatagcccgaggcagtgcaaaagtgtagtctttccacatccgcttggaccaacgagggctgtcatgacccctggcgggcactgaacggtctcaccatcaagcacggtccgcccaccaattgctactgaaatgccctgtgcttcaatcaacatctgtacctcccatcaaattctacgctataaaaagcggcactcatttattccattcctcctcatttacttaactatttttactcttcaagccgattaatcatcacccacctaccacattaataggggaacgtttttttctctcttgtagacagtgtcgtgacatactatctcttcttcgtcacaaacattaattccttttacaactagcaaatttcacttgttgtaccataagtaacctattgactgccggggcacaaagaatttgtttcttgtcaaatttgctgaataacggccggcatcaacactaaacctggaaaagtagaggattgcaccgcataaaataacttactgctaaggctaccaagataaaactacaaaattaaataaacctattgctttccaaaaaatgttagttgcattttatgttttttcctgcagatatgcactatcttttgtggagatgctttggcagtacaccgaaagcatctcctttttatatagatacattaatttaaaaattttaagaataaatactcggggcgcataaaatgccgcgcccctcaaagcggggtattacccctattgaattctcagagtttatgaaactttgcaatcaccggaataaaaaactatcaatcggtaagtgcttctggtaaattgctcccgcatcgacacggtagtgggcgaaaagacaagctaactcgaccggtaatccaaacctaaaatccggtatgtccttaccaaaataaaaacaatgaatatagatttaactctctcgaaaataacggcctgctgaaatctcgatttcatagatagggatgattgccgtcagcaggtgcaagaagtgtaaacaacaaagcccgcgtcatccactataatacgcttatgcaaagcgggatctcccagaacttttctgggtcttgccatgctagccccgttgacagcaaccgttttccctttgattagttggtgcgatagtagtaacgacccttaagaccaggtgagtttatggctccgacataggcattagagtagcggcccgcagccgtatcaatacttctattcgttttatccacttttccatcgatgagcttttgcactgtcgagccgtggacctttgtcgggtggttgtactctgaacggagcccggcgtttacgaatccatacctccatgtaccaccttccgatgggtactggtagtgataacccggattcacccatgcaaatgaaggcaccgtagcgcctcccaccaaagcgatggacattgtcaacacggcgagcgtcgctttaattgtccgagtcaaaggtttcctcttttttttctcatacaaatgatttttcattatttcattcctcctctttcattcgactaataaatttactctataagttagtttgtcaccgcccacataccgtgtcgatgcgggaagagttttttccctcgttggcggtgccatgatcatgactcctctttgtcaccagacatcaattttttcctccatgaccaaccctcgatccgaggtcatttggtcacgacttgtccacttcgacgaaatactgtcacctagcattttgatcacctcctcaataccctaatggctggcaagcaccacagtgtcctttactgcattcggttagtgaccgaatggtgcatgtcagaaacctcctaatctgttaaaagacctgctttttccagtttggattagtcagaaaatgaaagaagaagaacaaaagcaagtcaccaaattcaaatcttatctacctgaactggatgtattatgctgactcctgaagatcatttgatccggttagccagtgagaacgtggaccgtgtggctctatcattcagaaatactccgaatgtggaggaactcgtacaatccgcctatgctgtttaatttatggttatatatatcacgggtgtttcagcttccggaaaattcagacggctatccttaaatctgttcactggttgtaaaaggggagcgtcgtggttttcgcactatcagcgattttcggaaaagcaatctggatgtgttccaaaattgttcacgcaaaacagataaatcgttatgtaagcagataaaatggtaatctcagcgtttcgaaaaagaggtcaagcagatggtggaagaagtcaaagaagcggatgtcaaagatgaaggactgctctctcttttcccgaagacgatccgccgcaaaattcaatatcgtagaaatcggcttgcaaaagccaacgcggcattacaagaactggaagaacgcacacctgaagaaaaatagccaacgctacaaagatcaaatcaattttactgatgattagcgtcccatatcctgtctcaaaaagcctataattcacaagtcggtgttgaaggcatatgatttggcctagaaaagaataacagcagaagcttccggatgatttgggacagtgtcctggataatatagagacaaaacaggtgaaacgccaaacaactactgcggatgccaaacactatagtcctgaaaacatcctgccaaagaaacaaatcaaacaagatacctaaatgagagcaaataaacgaagaatccatatgacaaaagcagtttttatttgggtccggggaccctaacaccaactctctttaactcaaattaactaattttataataattgtaaaacaaaactgattcaagaggtttcctgattttttaaaaattttggtcaaaatgtattagatttgctaatgtataaaactcttagagggtatcagaatggatatttagattattttccctttttgttatataaaaatgaaaacttaaattcccatcttcctttaaatgcttaaccgattcagaaaattgtagactgttttaatgtattcttaatgtagcaaattgttggggattttctatttgcatttgagaggtgtaaaaaaagacaagcctaattgcttgtctcctgagtaattgtgtgtttctcctattcttaaggtaatatggataagttcaaattaaaattttccatcatttatgataaggctcccctcgattaatcctaaaagcccgataaacctgctcgagcaaaatcagcctcatcagctgatgcggaaatgtcatccgtgaaaacgacagcttctcatctgcgcgcttcaggacggcgtcgcttaagccgagcgagccgccgatgacgaaggttaccttgctctttccatatgtggcgagtctatccatattatcggctaattcttccgaacttttcatttttccttcgatcgccagggcgatgacgtgggcgtctgggctgattttggagagaattcgttcgccttctttgtctttgacgattttcatgtcctggtcgcttaggttttccggtgctttttcgtccggaagttcgatgatgtcgacttttgcgtatgccgaaagccgttttatgtattcatcgattccttgttttaaatatttttcttttagttttccgattgctacgattgatatattcacaggtcatccccactttaagaacaagttattcagatgcattatccacaattgtggataaaggttgtgtatttagtgtccgatcattcgttccccactatatatactgcaggcttatcacacaattcacaggttgtggataaactgtgtgtatgttcgatttttctgatttccggggccaattcttcctcatccacatacatgtcaatgaccgtttcaatatgctcttcgcaagacttcataaaagtccctccaatatctgtatcattgggctcttttataaaaaagctccttattcaatataccctatttatgcacatgttagtaggttttagcatgacttcacgcggttatccacaagcttttatattcctctggataactctgttctctccaaataaaaaacaccagccaatctcgctgatgctttaatcttgtttttatactgcttctcttttttcctgaacaactaaagaatgctgatttgtaatatactgcaaatatgaaacgttaagaatgaaagtccaaaacccgttaacctgcttttccgacagcccaataaacgcttttctaaccttaaatgcactatataaatttaccgtccaaaaaaggaggaatgagagctgcgggagaaagctgtgtccggggcgcagcgggagaagcaaaatgctgttgctgtatggcagcaggtcttcactttgaaatgtgattgaataaaaagtccaaaaaggctccaaaattgaaaagacgcttaacagcagcgtcactttaatggcgacatacgggagcttaatttggcatcgttctaaattctttcttcttgagagaaaccaatacgggatgtatatgccggacgttatgatcgttaataacaccgcatataagggttttattttcggaaattcctctaattccttactcatgctgaaacactcttctttccttaaaactgttcttccaggtctttttatccttgtcatctatacttttccactttccatatcaaaatgtactatattgaatccaataaatcaaaatccattgaagtgttaaattgggattttcttaggtatatggattcttttttttgactagaataaaaaaactatatccttttgcccgttccttatttcgtgttcatctgcagaaattcgacaatcaataggacattattcgtcatatttttacctttgtaatatgcaatctgtcattacgcaacataaaggggttctatcgaatcattttgtctttttttcgttatttttcgtatctctcaactaggaataatgacacgctatgttccatgtggaacattggatatgaaaaaagatcaaagctttcacagctttgatcttacagtctcttgctcatatgcaaatctgtcgtctcgaaattcattttttcatatagtcgcttcgcttttttattatgggcgaatacatgcagggacagctttttgactcctaattgctttgcctcctcttctaagacggctaaagcctgctggccgattccctggccgcggtacgcttcataaagcccgaaatcgtaaataaacgcttccttttgagggtggtgcggatcagcgtagatccaaacccagcctgcggcgttcccgctgtcgttcatgattgaccatagataatggttgatcgtttcaatgccgtttggcaaaagggccgcaaactgctcttctgctttctccatcgcttccgccactgtccatgtgcccgcttttactttctccatggcgtaatgctggatggaataggtctggtatatcttaaagtcctcttccgtcattggcgtcaaacggatttccggcttttttctcggtttgttcaagtcaattttaattttcgatttcaacatcaaattgtacttcacttccttgtttatagatcatgatgctttgctcagccattcgcttttcggctcggaaagtttattgattctgtgctgaatgtaaatgatattcaaaaggaaggcaaaaatcgatccattcgcaggttctttgcctgaaagcttgtttaatgaagcagtcaccaccagtgcgcagtatatcaaaacacctgcggacagaatcaaaatcacgcggtcgagcagcatataaaggctgtaatgcatgtcaggaaaagcgatttttgctgatattctaattggaatagaaaataaatgataaaatatgatagcttttaacgtggtgtagggaatatcatgataaggcagcaaatcgaagctttttttcctggatagaaaccagtatggtatgtaaacccccagtgtgatcagacatagcacaaaaacggacaagatacttctgctctttacattagacagcgttttcaacgcagcctgcacattgtcgttcatatcattcctccggacactcgttttccaaacaaatgaattgaatgaattttttcatagcagcggcacaccccctcaatatattcttttctcttgttttagacaatatgacttaggtaccaatgtgacaaaagaaccatttttgaagaggttgctgtcttcacgattagctgaaaaatgtgtgacaaccgtttttatgtcataagaatgacacaaaagcaagagcctgactggaaaatcaggctcttttgtctaacgctatatactttttcgaagagaaatccgccagttgatgcctgtgccaatatggtatgttttagcaaatgatccttggttgagggcaatgcccaagcggtctaatgaattgatataaacaaccggcttgcctacaggcatatcggcaaacgaccggccaaatgccaacgtttgctgatagacttttgtgtcttcatgcttgatgacgacttctactggatctccgtattgaacatcaagtgacttgaagagcgtccggctgatattcgtccaaaggtttccaaaccggacatctaaaatatcgatcgttccggttatccaatcattttcgatgtacgcttccatgaccggcagtttgacgatggaatctatagaaacttccggaccgatcctgtcgaagctgagagcgccggctgccagtattgccccggtgtaggcgtaaatgtcgcgtccatggaatgtatgtgattcgcctgattttggaagcctgttttgcgcttcatcaagatagcgcgcctcggcaattccattttgccggctgatgtgggtgagtgttccgttgtctggtgtgatgatatattgattggaagaggttctgactgcgacgctgcggcgttctgagccgacccctggatcgacgaccgacacgaagacagtgccttcaggccaataagaaacggactgcagcagccgataggaagcttcccaaatgtgaaaaacgggaatgttgtgcgtcaaatcaaaaatccgaattgaactgtcaaccgaataagccacaccgtacatcgcatttaccgccccgtcatcaaggccaaaatcagattgtaatacaagtgcatgctgactcatcctatctccctttccgccctgatctttaaatcctgcattaaatcggccatttgtcagaatattaaagtcatcatatcgtacgcaaaattgaaacgcaatatgatgctttgtccattttttacaaactataatttttgcagggcaaaaacttggaattcacacccaaaaattcgattattcactcagaaaaaatctcatttcactctccaaaaatcacattttttccttttgacgatcattcgttgggcgcttcataataaaaaaacagcccggccgtaccggccagactgtctttatcagcttcctaattgggatcgggtcagctttacttctgttgtcttttcttttccgccccgcaggtatttgatttttaccttgtcgccgacgtttttggtgtaaagctttttacgcagatcaacgatatcgtaaacacggtcaccgttaaattcgacgatgacatcgagctctttcagaccggctctgcctgcaggagataccggctgaacacccatcacaactacgcctgatgttacgtttttcggcagtttaagcgtttcctgccagtgatagcttgcgatatcgccaagtgatttcatctcaattccgagatacggccgtctcacttcaccgtacgtttccaaatcttcgataaccggaatggcaaggttggccggaatgctcagaccgatgccttcgacggctgattcagcgattttcatcgaattaatgccgatgacttttccatcaatattaaacagcccgcctccgctgttacccgggttaatggcagcatccgtctgcagtacttcggcgttccagtccggctgtccgtctccgttggaatcgaccggaacagcgcgttcggttcctgagatgattccttgtgtaacagatcctgaaaactgcaggccgagcgggtttccaatcgcgatgacaggctcgcctgtcttcactttatcagaatctccaaattcggcagctgcttttattttgttgctgttgacttgcaggacggccagatccatcagcttatcgctgccgatcagttttgccggaatccgtgttccgtcattcaggctgatttctatttgggacgccccttcaatgacatggtggtttgtcacaatgtgggatgtgttgccgtcctttttataaataacgcccgagcctgttcccgcttcgctgtcaccatcccatacacctgtcttttggatgttgataacgccgacaacagaatcagaaaccttagagaccacttgcgtgacttcattattcacgttgacggatacattgcggaccgtcccgccctgctgtgctccttggccgccgcgcgcttcgatgacttgcagattatacggcagccatccctgctgcgagagatacggcaaggcaaacactgttaaaagagcgccgatgacggcgccgaccaggcttgaaaacaaaaagcttctccaacttctcaccggcttttcccgaacgaatttttcctcatcatgattaaactccactatattcaaatcctttcaaggaacgatatatgtatatagtgtggatcatctgcctgcagattaatcattcaatcaggaaaatttacaccgctacgagaggcgtcggtttcttaggatcggtatcatataagtcaaacgtttctcctgccgcaaatcctttggcagccagcgtttgctgcacagacattctcgccagctctttcatgttgttgtcctggcttaaatgagccaaataaattctcgatgtctcatcgccgattacatcggtcattgcgagtgccgcgtcctcattggatacgtgtccgacgtcgcttagaatccggcgcttgatgttccacggatagcggcccatttgcagcatgccgacatcatgattgctttcaaaaacaaaagcgtttgccgagcggatgatgcctttcattctgtcgctgacatagcccgtatccgtaatcaaagcgagctttcggccattgtaatgaaaaacgtaaaacatcggctctgcggcatcatgggataccccgaacgattcgacatcaagggagccgaatgacttgacggtttccattggaaaaacgaacttttggccgttatccattttgccgatatgcccttccatcgccttccacgttttttcattggcgtaaacgggcagctcatattttcttgccagcacgccaagcccttttatatggtcactgtgctcatgtgtaacaaagatgccgtcgagctgatcaagctttcgatcaatttgcgccatcagcccttccatcgccttcccgctaagtcctgcgtcaactaaaaaagcgtggtcatcggtttccaaatataaagcattaccggtactcccgctcgcaagtacgctaaattgcaggctcatggtttctcactccattatgatttttcctttttctcttgtgattgaagaagcgctccgtcccgtgcatccacgataaattcttcgtgaatggttttatcgtccgttttgcgctccacttcgatccgccaaacgggcacgaaaatttgagcgcttgccagcggatactgcgtgaaatagccaagctcggctgatttaattttgctgtacttcttcaaataatccgggtagtataaagcttcaaccgcgccgactgcagagatcagattttccgttttgacttctttaatatcctgcagcattgactgcttataagacacgacttcgtttttattattcaggtacagaacgacttcgcccatctcgttgttatcatcattttgccggtcctgaaaaatgtaattcccattataggtttggaagaaaacgatctgttttccggacttatcgaccttccaaagcttgtacttattgccgtcgataatctcttcattcacgatttcccttgcttttgtcttcatatccgttttcggaagcgcaatgggtgtttcaaactccatttctatttctgtcaaagcgttctcttttgcggtattcattaacgccttcggcttttgcccttttaacgatttaatctcgctttgcttaaagactcgcttttgtgcagagattgaggagccttttgacgtctctttagacaaattgccgtatgaaatatggtctgctttcatatcctcctgcagcgttgatttttctaaaatcggaaactgattgttgctgcgcttattaaagtattgaaaggccaaaaagatatcaaggatgaggaagacgataatgaagattgtttttgttctattccactccattttctatgccctccttcaccgctgaatccttctttgataccggctttaccgtaccgtttattttaatgcaccatgtcggcacaagtttgacaagagggtcttgttcctctgatactgagaccatttcataggcggggaaaatttgctcaatcttatcaaagtcatactcttcattgtcttgcaggaactgaatcaattcttctccgctcatgatttctttatcctttttgctgaccggatttgcgtttgcgcccaagacatatgtcgggtgtttatagtccaatatgtcgttgtttgcccagcgaagttcaatcgatgtcgttccgaaaggctggttttggctgttaacgaccggcagctgatccataaacagattaaagttgatctgctgattttcattcaaaccgaaaaattgataatcatccgtccagcttcccgtgtcgtttaaatatttgaagcttttattgatcagctctccattttgataagaagtactcggttccaggttgcggtgctggaacttaatctgtctgttgttcgagtagatctccaaaaggcttgttccatccgtatataccggtctgtttaagttggtttcctgccgcacggtttgcggatcatcaaataaagcttttttaaaacgcgtcgggctgatcgtttctgtaaaatactctttttcagacagcttcagccgattaaccggaagcaagacatctctgcgcgaattgattgcaaaatcctcataaagaggcatctgcgacttttctttttcaatgtctgaaaggatgttgcggtaatttgccgattcaatcaccgcttcaacaaccgtctctttgctgaaggatacaaaatagatcttcttcatgccccgtccttcattgaaaggaagaacgattctgtcaaaagagttgtattcataagaattggcggaccatttgaaaagcggctgcagcacatcgatcggaatgttgtcgctgaagacgagatccaatttggagtctttatttttagcgtatagccagtttttgaactgctgcctgtcaaatttgtccgagatatcctttaacgatttgacttcccatcgtcccatgtcatcccagagctgagaatagagcgtcgtgtcattcagcaaataatgctgtccattctcatgaatgaacatttgctgcggtttgacggcttcatttaacaactttgtctggtttgtaatcggctgtttgtcgctgacctgagcctgtgagtcttcaactttttcgtaattcccctgaaatccccaaatattaaaagtaaaaagaagactgatcaaaaccaaaagggacagtattatcgttttaattgtttcacgcttcatcccaatcatcctcttgttcttctttatacggcagggtaaatgtgatcgttgttccttttccttcgatgctgtcggcccagatgtcgccgctatgggcttgtaccatttcttttgcgatcgcaagaccgagtcccgtaccgccgagtcttcttgttctggctttatctacacggtagaaccgctcgaagatcttctccacgtcttttctcggaatgccgacaccttcgtctttgacactgacataaagaagctcttcttcttcatttacatcaacagagaacgtgatatggcctccttcaggggaatatttcaatgcatttgaaatgatattatccagcacttgcgtaatcttgtccggatcgatttcaacatacaattctctatccggcagattgctgataaactcaacatgctgctctttcgtcatttcaaagcgttcaataatcaatgagaagaaacggataaaatgaatccattctttattgaattgataatctttgctatcaaactttgaaagctgcagcaggtcgttgacaagcctgatcatgcgctctgtttcattctgtgtcacattcaagaagcgcggcgcaatgtttggatcctgccatgccccttccgcaagcgcttctaggtagcttcgcatcgttgtgagcggcgttctgagctcgtgggagacatttgcaacaaactctctccgctcttgatcgatctgctcttgttctgtgacatcgtaaatgaccgcaatcaatccgtcgatctttccgtgttctttttggatgaccgagaaattgacgcggagcacagacgtccgttcttcctgttcaatttcaagaagcagggaatcctgctgttcaaccaaatcttcaaacgtgtattcgtcttcaaggccgagcagcgaagtgatcggcatttcaagagccgtttcacgtgaaacatttagaagctccagcgccggcgtattaagcaaaataatcgcgccatttcggttagtcgcgataactccgtctgtcatatacgcaataacagaagatagtttttttcgttcgccttctgtcatggactgagcttctttcagctctcttgttaaataattaaacgttgtggccagctggccgatttcgtcgtttccgtacttcctgacttttcttgagaaatttcctttcgccagttcaatggcctgttttctcatatctgacagcggatgtgtaatcgttcgcgcgacaaaaatcccgagaaaagcagtgattccaagcgcaataaaagttccagacgctaaaatggtgttgatcgtccggatttgattgtagacattatccatcgatgccacgacgtaaatggccccgattgtctcttgattcgattttttaatcggtgtgaccgaaatccgcactttgctgtcccgctccgggtcgaaaaatttattttcgtatggaatgccgacaagcagcgtccttttgataatgccctctgttgtctttttccccgccacctcccggttataaggattggaggtcgcgatgacttcatagcttttatcaatcagactgacttcgagaatttcgccttctttgctgaaatcatttagaatccgctctgcatcttccttcaaggtagacgaggaagatgtgcttctatccttcgtcatttcctgttccagataatacgataggttgttcacccgctgatcaagagagtcattatatgatttaagaagtgacttctccatctcattgacaaagtagacgccgataatctgcatggcgacgataatcagcagaacgtatattaaggtaaacttaaaatgaatcgagcgaaaaaaacttactttattcatttgtgtattagtcctgttccggatttctcaaatagtagccgacaccgcgccttgtaacgatccagcttgggtgactcggattatcctcgattttttcgcgaaggcgtctaaccgtaacgtcaactgtccggacatccccaaagtagtcgtatccccacacggtttgcagaagatgttcacgcgtcatgacttgcccgatatgttttgcaaggtaatgcagcagttcgaattcccgatgtgtcagctcgattgtctcgtcgcgttttgaaacgacataggcatccggaaaaatgacgagcgatccgatttgaatttcgtttgaagacgattcttcttcggcaggagccgctgtgttctgtcttctcaggttcgctttgacacgcgccagcagttcgcgggtgctgaacggttttgtcacataatcgtcagcgcccagttcaaggccgatgactttatcgatttccgaatcctttgctgtcagcataatgatgggcatatcatattttttgcggacttcacggcacacttccacaccgtctttattcggaagcatgatgtcgagcagaatcatatcagggttgagatcctcaaccatctgaagcgcttcattgccgtcgtatgcgcaatggacttcatagccctcttttttcagattaaactctaaaatatcagcaatcggcttttcatcatctacaactagtatctttttttccattattcattcctcctggttcagagtttggatacagccagcggatggctgtctatgttttatatcaaagtacactgcatgtcatcattaaaaaaacactttctagaaatcgaaatagatttcttatacattataacgtttatgaagcaaaagttaaaaaaatagttcaaaggaaaacgtttggaaattaaatccacgctttatttttccgcttttatcacaacaattaaatttttgtgactttttttactgaaaaatgaaacattttatgcttcaaagccgtctatatagtaacgtcttcttcttcggccgggttaccggcctccctttttttctccttttcattccttcagcatttttatttcattgatttcagctaaaagaaaacgcatctgcttaaaaacagacgcgctttttagagtggctcgggacggaatcgaaccgccgacacacggattttcagtccgttgctctaccaactgagctaccgagccgggtatgtatgtaactttttataaaatggcggtccggacgggactcgaacccgcgacctcctgcgtgacaggcaggcattctaaccaactgaactaccggaccttgcatgattacagtacctgctgcggagaagaatcgtggtctcctccggagcaagcggggatttagcaataacgctaaagtaaatcaatgacccgtacgggattcgaacccgtgttaccgccgtgaaagggcggtgtcttaaccacttgaccaacgggccagggaaatggtgagccatgaaggactcgaaccttcgaccctctgattaaaagtcagatgctctaccaactgagctaatggctcgtctcgttgttttcgcaacaacgagatttatattatcatagaacgaacagaagtggcaatatatttttttatttttttctattattttttcccttcgtgatgatactccgccccttcgcggttcagccagtgcatgattccattcggatggaatacagacaacagccggtcagcttcatgaagcggcacccacttggcttcaacaatgttctcgtcaaacgtgatggcatccggacggtcggtgatccgtgctctaaagacgatgaaatatacatgctcgctgctgatcaccgcttcatttacggctaaaatatcaagaggctgaattccatagccagtttcttccttcatttctctcgccgcggcttccgtcagcgattctccagcttccaccttgccgcccggcaatgtccatgattgatttttcttgtttttcaccatcagaatgttgttctcttccgcgaatgaatatacaacatcgacacgttccatccgtttgccctccttgtcattgaaaaacaaagcccctgcggactgcagaggctcttctagaatttagttcggacgataaacgcttctcaccacatttgtttgagagcggtcaggaccgactgagaaaatggaaagcggaatgcctgtcagctgagaaactcgctcaaggtaatggcgggcattttcaggcaggtcgctcaagcttttcgcgcccgtgatatcttcggtccaacccggcatttcttcatagacaggctcacattcagcgagcgcttttaagcttgccgggaactcttccaggatctcgccgcggtatttgtaagcgacacagattttcaatgtttcaataccggtcaatacgtcaattgaatttaatgaaaggtcggtaattccgctgacgcggcgggcatggcggacaaccacgctgtcaaaccagccgacgcggcgcggccgacctgtagttgttccgtattcgcggccgacctcacggatttggtctccgatctcattgttcagctctgttgggaacggaccgtctccgacacgcgttgtgtaagctttcgacacaccaacgacgtgctggatttttgtcggtcctacacctgagccgatcgtcacgccgccggcgacagggtttgaagacgtgacaaacggatatgtcccttggtcgatatcaagcataactccttgcgccccttcgaataagacgcggcggccgtcatcaagtgcgtcgtttaagacgacggacgtatcgcagacatattgtttgatctgctggccgtactcatagtattcgtctaaaatgtcttctattttaaatccttccgcatcatacattttttctagcagacggtttttttcttccaaattgcgggcgagcttttcttcgaaaacgtccctgttcaacagatcggcgatccggattccgacgcgagcggctttatccatataagccgggccgattccttttttcgtcgtgccgattttattggcccctttccgctcttcttcgaccgcatcaagctttaagtgatacggcagaatgacatgggccctgttggagattctcaagttgtccgtgctgacgttccgctcatgaagataagccagctccgttaccaatgctttcggatcaacaaccattccgttgccgatcacacacgttttatccttataaaaaataccggatggaatcaaatgcagtttgtacgttaccccgttgaatttaatcgtatgtcctgcgttatttccgccttggtaccgtgcgattacctctgcattttcggaaaggaaatcggtgattttgccttttccttcgtcaccccactgcgtacctacaacaactactgaagacatatccgtgcacctccgttaaccttttcaaacgatatcaatatcaaacacattcagtttatcagtgtcatcccgtaaagtcaattgtaaatccgaacattaattttaacgttgaacatttttgttcgttattataaagcgaatttcatatattttctttttaatagacagtctgtaagtcaaatcttaaaaaaaccgtttttcttggacaaagatacataaaaaaccgacaacgcaaatattcaataagtaaggagggagatgccgatggagacggtattaatttttgcatcagttttatcgccgatcattttggctttggtcgaattggtgaagaagacggtcaaaatgccgaaaaatttgattccgctcgtttcactcttgataggtttgctgatcggtgccgcagcatatccttttacagaccttgaactggtgctccgtttatggtcaggaggactggccggattaacagcgacgggtttatttgaaatcggtaaaaaccgcaatgcaagaaaaaagaaaaatccctgagaacatgtctcagggatttatgcaccaggcgcaacacccgcgtcatcaaaccggcgttccaggttgacgaacttattatattcttttacaaaagcgagtgagacggtcccgaccgggccgttcctttgttttgcaataatgatttcaatgatgtttttattctcagattctttgtcatagtaatcatcacggtacaggaacgcaacgatatcggcgtcctgctcgatacttcccgattcccggatgtccgacatcatcggacgcttatcctggcgctgttcgacgccccgggaaagctgtgaaagggcgatgaccggaacttcaagctccctcgccagcgctttcagcgcacgggatatttccgatacttcctgctggcggttgtcacttgatctgccgcttccttggatcagctgcaggtagtcgatcaaaatcatgccgaggccgttctcctgctttaaacgtctgcacttggaacggatttcgctgacgcggattcccggtgtgtcatcgatgaaaattccgctgtttgataagcttcccatcgccattgtcagcttgccccaatcctcttccgtcaggtttccggtccggagattctgggcgttgatgttgccttccgcacagagcatccgcatgaccagctgctcggcgcccatctcaaggctgaagatcgcgacgctttcatcggttttcgtcgccacgttttgggcgatgtttaaggcaaaagcggttttgccgactgacggacgggcggctacgatgatcaaatcgtttctttgaaagcccgccgtcatcctgtcaagctcggtaaaacctgtcggaatcccggtgatgtccccttttctgttgtggagctgttcaatattatcgtaggtttgaacgagaacatctttaatattttgaaaggccccggagtttttgcgctgggcgacttccataatcgttttttctgcttcgcttaagaggtcttcgacttcatcctcccttgtatatccgtcttgggcaatcgtcgttgctgtacggatcaagcggcggagaatcgatttttcttccacgatttttgcataatactctatattagccgcagtcggcacagaatttgcaatatccgtcaaataagaaatgccgccaacctcttccaaaaggtccgtgttcgcaagctctgatgtcaccgtcaccaggtctacaggctcgccgcggtctccaagaacaagcatggcgttaaatattttttggtgcgacattctgtaaaaatcatctggaatcaagacttctgacgccaaagttaaagctgatggttctaaaaaaacagcacctaacacggcctgttcggcttcgatattttgcggcggcagcctgtcattcagaagatctgtcatgttaagcaccgtcctcccatttaaaaataacccaacgtctattttaccatttttacagaaaaaaaatagactcttgcagaatcgcatgttgtagaaatattttcatagaaagggagaacagctgtcggaatgtttgcttccctgatctatacgggaaacaaatcagtaaacaagtttcgggaggttgtttttcatgaaggtttatacggtatcaccaaatgccgagacagacgggtggtttttgaaactggaagatacggcgcctgttgagctttatgatacaaggacagaggccgtggaaaaaggagaagagatggcgaaagagaaccgtcctgcgaagcttgtcatctatgaccggcaggacaacaaagaagacgaacggtcttattaaacacctcggccgaggtgtttttttaaagattccacaattaatccacccggctgttccaactgtttttcaagggaatgctgaccatcaaatcggtcgcatgttggtacaaatcccattcttcataggccgcaaatttcatccgcagcgtttgcagcacattgcgcatatctttgtactcttcaaatgtgtaaagcccttttgctctgatctgctgttcatacaatttctttttcagctccgatatcgtcgatttcaagacgatcacctccgctttatttatatcgcttttttctttttcttccaactcacttgtcatatgatgttacaatatatattggagtcaatattcactgttgcgtactctgcgcgctggggtacaatataaaatggaggactttatgaaacctttacaaatttctgccgaaacggcgcaaaaactttcggaaaccttaaatcttcctcttgaacaaatcatgcatttgccgcagcatatcctgcttgcgaaaattgccgaaattcagaagaaagatcaatagtaaccttggatgatggtccgggtttctttttcatgtcacttttccacctggaagcaaaggagaatacagcatgcattacattgacgctcgacgcgcccgtttgaacaatatctttttgattgcaggaatcatatttatcgcttttaatttaagaccggctattacagctgtcgggccattgatcagttcgatccgctcggatatggatttgacgaacggcatggccggcttcttgacgacgctgccgctgttatcgttcgccgtcctgtccccggtcgcccctaagctcggacagaagcttggcaatgagagaaccctctgggtcggattggtcatcttattgatcggaattttgctgcgctcttacggagaatctattacattatttgcaggaaccgcattgatcggagtcggcatcgcaatctgcaatgtgctgctgcccagcctgatcaaacataaatttcctgacaaagcgggaattatgacaagtttctatacaacagccatgtcgatttttgcggcgctcgcatcagggatcagcattccgttgtcgcacggcttagcgtggggatggagcgcgtcgctcatggtttgggcgggcctcgcgtttgttgcgattttgatctgggttccccagctccgctatcatgatacgggaaaccgcacggtcagcttaaaggcagacggccaaacggtctggcgctcgaaaattgcctggcaggtcacattctttatgggcatacagtcgtttttgttttactgcacgatcgcctggctgcctgaaattctccgctcgcacgggatgagcatgtcgcttgccggctggatgctgtcgctgatgcagtttgccagcctcccgtcgacatttttgactccggttctcgccgggcggtttcaaaaccagaaaagcatcgtgctcgccctcggcatcctatacttggcggggatgtcagggctattgtacggaggcagtacagcgatgctgacgctatgggtcattttaatcggaattggacaagggtccagcatcagtttagccttgactttaatcgggctgagaagcgaaaatgccgatcaagccgcggcattatcagggatgtcgcaatccgccggatatttgctggcagcgattggtccaagctttgtcggttttctttacgatcacatgcactcatggaacggaccgattttactgttcatcggcgcgctggtcgctttgatcggtgcaggactcggtgcgggaagaaatcaatatatctatgctaaagcagcataacgaagccggcagataagccggctttttttttggaatataacctgacaaaccagcggccaaataaaccgtgatgccgtatgatcagatttgacaaaaataattcacttattggtctagacaactagagttgtaatgttctatactgatgataacgttttcaagaaaggacttttgactgtgaaaaccaaaccatctcaacgctatatttttaaacatcttcatatttacagtgaaaatggaatgatagaagacggttttcttctgacgaatggagaaaaaatcgaggcttacggaccaatggctgatattccagcttccgcacaaacggcagaacagctgacatttccggagaacttcaaagtgctgccgggcatgatcgatgtccacattcacggggcaaacggcgcagatgtcatggacggaacagccgaggctttgcaaacaatggctgaagccctgccgaaagaaggaacgacaagcttcctggcgacgacgatgacccaagataaagccacgatcgagcatgcgctggcaaacgttcaccggtataaggaagccggcggacggcccggaacagccgaagtattaggcgttcacttagagggcccttttatttcagaaaagcggtgcggcgcccagccgccggatgacattatagcgccggatctttcgttatttaaagaatggcagcgcatctcagggaataacattaaattagtcacacttgcgccagagctggaagggtctttggaactaatttcctttttgaaggaaacaggggtcatcgcatccgcaggccattccgacgccggactcaaagagatggaagccgggattaaggccggcctctcccatgtcacccatttgttcaacggcatgcgggggctgcaccaccgcgagccggggactgccggtagcgctcttctgcatgatgaactgaaggctgaagtcattgccgacggcatccatgttcaccctgccgtcatcaagctggcatttcagcaaaaacagaaagaaggcatcattttaattacggatgccatgcgcgcaaaatgcttgaaaaatggaacctatacattaggcggacaggaggtgttcgtaaaaggcgataaagccgttttacgggatggtacgcttgccggcagcatcttgaagatgaaccaggctgcactgaacatgatggattttacgggatgttcactcgaagatatcgtctacatgacagcagtcaatcctgccagacagcttcatatttatgaccggaaaggcagcatacggagcgggaaagatgccgatttgatcattttaaatgaaaaaaatgaagttgtgatgacgctttgcaaaggcgtgattgctttcagcaaaagggaggtttcaccatgaagatcattgaagctaaagattatcaggacatgagccaatcagccgcccgattcatcatcgagcaagtgaatcgcttatctgcacctgttctcggccttgcaaccggaggaacgcctctcggcacatatcaggttttaagggaagatcatgcgcgtaataaaacgacttacaagcacgtctatactgttaacttagacgagtatgtcggcgtttccccggatcatgaaaacagctatacattctatatgaaaaaacagcttttcgatcacattgacatcccgctcagccacacccatcttccgaacgggatggcttgtgacctggatgccgaatgcagccgctatgaagcgctgatcgagcggcttggaggcattgatcttcaagtgctcggcctcggcttgaacggccacatcggatttaacgagccgggcaccccattttcatcgaaaacgcatacggttgaactgacacaatcaacgaaagaagccaatgcccgctattttgattcctatgacgccgtcccgtcgcaagcaataacgatgggcatttccacgatcatgaaaagcaagcagatcctgctgctcgtttcaggagagaaaaaagccggcatcttggcgaagctgctcactgaagaaccaaatgaagacacccccgcttccgtcttaaaaacgcaccaagacgtcgtcatcatagcggacagcgatgctttatcaatcgtgaaagaaaggggtatggccttttgatcaaaaaagattcccacattccgatttactatcagattgagaccgaaattaaaaagcttgccgaaacaaaagatttgaaacccggcgacctcattccttctgaaagagagttcgcagaaaaatatgaggtgagcaggatgaccgttcgacaggcggttaacaatctcgtcaatgaaggcattctcgtccggcagcggggaaaagggacatttattgccgagccaaaaattgagcagcctctcaaaggattgacaagcttttccgaggacatgaaatcaaggggcatgaggcccggcacgaaaatgctcggcttcggcgtcatcccgtgcgaccagagcacagcgcgcaaactggagatacgtgaaggggcttccgtctatgaagtcaaacggatccgcctcgccgatgacatcccgatggcttatgaaatctcctatttgcccgccgacttcattaacggcctgaccgaagacattatgagcgcatctttgtacgactatgtcgaaaatacgctctcccttacgatcgaccgggccgcgcaaacactagaaccggcgattgcctctcaggcagagagcgagcctctcgacatagaggaaggcgcaccagtcctgctcattgaacgcttgagctatttggacgacggcagaccgtttgaagtggtcaaatccgtttacagaggcgaccgctataaattcgtcattgatatgaagaggaaagaccaatgaggaagacagagaatacgaacgacaaaagcacagcacttgatgaaatgaatgctttagatatcgtcaccttgatgaatgaggaggatcacacagtccctcgcgccattacgccctgccttcccctgatcgctgaagcggcggagacgattgtcagccgttttgagcaaggcggaagagtgtttaccgcaggcgccggcacaagcggcagaatcgcagttcttgatgccgcggaactgccgccgaccttctctattgacgagagccgttggaccggcctgatcgccggcggatatgacgcaatgtggatgcctcttgaagaaaatgaagatgaccgtgaaaaaatcgtcgctgacctgaaagcgcaatcattctcgaaagatgacgtcttaatcggagtcactgcgagcggttcgaccccttatgtcctcggcgctttatcctatgccaaacagatcggagccgcttctgtttcgatcagctgcaacgcggatacagaagcgggcaaattaagcgatatcgcgattgaggttcaaacaggaccggaaattatccgcggttcaacgcggctgaaagcaggaaccgctcagaaaatgatcttgaacatgctgtcaacagcggcaatggtgaggcttggccgcgtctatcaaaacgagatggtgaatatgaggctgctcaatcaaaaattagccgggcgcgctgtcaccattctgatgaataccaccgggttatcggaggatgaggctctgcaagctttaaaagaaagcggcaatgacatcaaggcagcgatctttatgacgttgacaaacggaacgcttgaagatgcccgccgctgtttatcccatgaaaatggacatttgaaaaaagcgattcaatatcatcgaaaggggttttaactatgttgggatttcttcaaaatatcggccgcgcgctcatgctgccgattgccgttcttcctgctgcgggcctcctgctcgcactgggacgggaagacctgttaaacattccgtttatcgctgcttcaggacaatcaattcttgaccaacttccgatcatctttgcgataggcgttgcgatcggattgtcaaaggatggccacggggccgccgctctgtccggagccatcggttattttgtcctgacaggcggcttagcagccatcaataaggacctgaacatgggagttctcggcgggattattgcaggcgttgtcgccgccgtcatgtataaccgctttaaagatgcaaagctgcctgactggctcggtttcttcggcggaaaacgcagtgttccgattatgacagccttctgttccatcattcttgcaggcattttcggcttcgtctggatttatgcacagcaggcaattgacgccattggaggatggatcattcatgcgggggcattaggggtcgggatattcggtcttttaaacaggctgcttttgccgctcggccttcatcacatcttaaacaacatggtctggatggtctttggagaatttgcaggcaaaacgggtgacatgaaccggttctttgccggagatccaagcgccggcgcctttatgacagggttcttcccgatcatgatgttcggtcttcctgcggcgtgtctggcgatgattgccgctgcgaaaaagcatcgccgcaaagcaacggccgggttgctgatcggattggcgttcacatcatttttaaccggaatcacagagccgattgagttcacattcatgttcctgtcgccgcttctcttcggtattcatgccttgttaaccgcaagcgccatgaccgtgaccaatatgctcggcatccatcacggctttaccttttcagccgggacgatcgactatctcttaaactttggaatcgccacaaagccgctgctcttgctgccgcttggtcttgtttacggcattatttatttcatcatcttttatttcttgataacgaagctcaatttgaaaacgcctggacgagaagatgacgatgagcaggaaaacaccgctgtcagccctgacacaggatcgtctaaatacgaaacccttgcggacaaatacatcgaagcgcttggcggaaaagaaaacatcgagacgctgaacaactgcgtgacccgcctccgcctcaaggtccgcgatgcttccaagctggatgaaagcgcgatgaaatccatgggagcgaagggattcgtcaagctcaatcagcacgaggtgcaggtgatcatcggtacagacgtcgaattcttggcgaatgaaatgagaaaacgtacggaataaaagataagccccttctgaggaaggggctttgttactttatgattgctctttcacgtgaactttcagtgttgcttgtacttccggatggagcttcacgggaacattcgtatatcccaatgagcgaatcgcatcgtttaattcgattttgcgtttgtcgacttttaactgatggcctttttgcagcgcatctgcaatttgtttgcttgtcacggagccgaataaacggccgccttctccggacttggctgaaagctccaccgtaatctcctcaagctgttttttcagctctttcgcagattttagttcttcagccgcttctttcttctcttttttcttctgaccttcaagcgcgctgatattggcggatgtcgcttcaacagccagcccttttttgatcaaaaagttgtgcgcgtatccatccgctacatttttcacttcgccttttttccctttgcctttaacatcctgtaagaaaattaccttcatttctgaatgcctccttcgaaatactcgtcaatcgcttctttcagtcggcggagcgtttcttcaaccgtgatatcggtcagctgtgtcgcagcattggttaaatgaccgccgccctcgagcgcttccataatgatttgaacatttacttcgccgagcgatcttgcgctgatacataccgtgttctcgtctcttctcgccacagcaaatgacgcttcgacatcgctcatagacagaagagaatccgcggcttgtgcaatgataacctggtcaaagtattcgtccgcctcatcgtccggcagcgatgcaatggcgatgccgttttgataaaaaacggtatgctggataagcttcgcccttttaatataatgatcggccgtttcttttaaaaacttttgcaccaatacagtgtcagcgccttttgcgcgcagataagacgccgcatcgaacgtacgggagccggtgcgcagcgagaagctcttcgtatcgacaataatcccggccaaaagagctgttgcttcgatcatgttgatttttaagcgcttcggctggtattcgagcagctctgtcacaagctccgctgtagatgaagcgtacggctccatatagacaagcagcgggtctttaataaactcttcccctcttctatgatgatcgataacgacgatattttcaattttattgaccagcctttcttcaatgacaaaagaaggcttatgcgtatcaacgatcacgagcagcgtgtcgtcttttgcgatctcaagcgcctcttccggcgtaataaacctggaccacagttcttcgtattttttaatctccccgatcagtctttgaacacttgaaccgatctgattggagtcgatcacgacaaagccgtctttgccgtttgcctgtgcgaccttcaaaatcccgatggctgatccgatcgaatccatatcgggaaacttatgacccatgattatcacattgctgctttcagagacaatctccttgagcgcgtgtgaaatgacccgggctctgacgcgcgtccgtttttccataggattcgtcttaccgccgtaaaacttcactttcccgttcggctgcttgattgccacctgatctcctccgcgtcccagcgccaagtcaaggctggattgcgccaaatcgccgagctctttcaacgaggcaacagatgcaccgattccgatgcttaacgtcaaggaaatggtatgaacggatgtcttctcccgaacttcatcaagaatcgaaaactttgatgcttctagctcgcttaaaatatgttcgtttaatacgccgatgaaccgctcagaggaaacccgttttaagaaaatgccgtactcttgggcccactggttcaaaagcgatgttacttcactgtttatcgagcttctggtctggtcatcaagcccttgcgtcacatcgtcgtaattatcgagaaagatgtaggcaagaaccgttctttcattttcgtattgtttttcaatctgcgtctgctctgtgacatcaaagaaataaagcagcttttcttcccgtttgatgaccacattaaatttccgctcattcagcgtaatcgtttctgtgtccacttcctgcttaatcaaagggacgacagattcacaagtatcataaagcgaccggccgacgagcgtattttcattaaagcatgacgccataaaaggattggcccattcgatatagtactgatcgttaaacagcatgatcccgatcggcatttcaagcagcgcctcttctccgacttttttcagacgataagacagcgtcgatatataattgtccagctcttttctgatttgggagtcggcccgcttcaaaaagtacaaaatgacacccagaatcagaacgccggccgcccctgccacccaattaaaataaatgttgatgaggacagaaatgattgtgacgacgattaaagaatatatgggatatcgaaataacggtttttcataaaaacttggcactcaaatcaactcctcaccattggagaacatcgcggctacgattttttcactctttctctcaagttaaagcctatatcaattatacctaagatgcgaacaaggtacagcaggggcgaaaacaacccgataattaaaaaaagaaccggcaggacagttggcagtttcttggcatggcaaaagtaaaacacaaatgaaaacccttggatgaccaagacaaagcccatgatgagactcgcatttaacagaacagagtaatatacactgccctcttcaacgggagccagcgacagaagaatcgtcaacaaatagatccaaataatgctttgcggaagtctcatatccctgaacggtttcagagacggtatttgtatgatgcgccgaagcaccggctttgcgagcagatgattcaaaaacgcagtgattccggaaaatatcacaatggccgtcggatataaatattgcgcctgtttgaattgctcatttaacaattcaatctgcttagccacttctttatcatttccaaactgtttgatactcgattcaaaggttttgaatgtttcattatatgcttgattggccgtctctattaagtttaatccaagaaactgaatgctgatgataagcagcaggacgaacgaaaccatatatgtaacggctgctgcagcaatcgcttgggccggctcttttcttctgtagtaaaagcccatgatcacgcccgcggcacttactggaatagcaaacatcagtccgcctaaggaaccggcaatcaatgaaacgggtaaactgaccaaccccaccgaaatccccggctttagaccgtgcctgatcgtttgaaccattgcaggcagcggcagcgtcaataaaagaatggttccgatgaaaggaatatagaggctgatcatcagcaaaacggcaaaaatactgaccatgatagcgccttctactaaagctcttgtttgtttcacttgttcacctcgtatgttgaaatgtcatgaatcaaaaagagcagcatagacgactgctcttttctaacgtcgcaatttcattttcaaataaagacgatgagatgagcaggtctcggccttctctcattgtttctttattctaacataaggtcaaatcgcaagtaaaacgatcataaggcttgagaaagcgagtgaatgttccatgtgaaacagtgtcagtcgagaaaccccgatttttctttatttttctttctcgcctttctgatcagcaacaatataatcaaaactgcgaccagaagcgtcacgcgaagccctccgctcaaaaatagaaaaaagtccttcaacatatccaacacattgatcacctctcactgttgtcacttagatgcaaaaatcccgtattatttgacttcccctttccaaaacggtctaaaacgtccctcagattcttcttaacctttagacggtaatgggcatatgctgactaagaaaaagcaataaaggagaatatgaatgacaacaaaaacattggcttggcatgaaacgttggagttgcatgaactaatcgcggcacagtctgtcggattggtgaagatcaagaaaagcatgaagaaaatcagcgaccctcagttaagacagctttacagcgtgtcagcaaaagcaaaagcattggagcaaaatttaagagagcttcttccctttttgccaaaagctccggcatttcagcgggaggatgaacgggctgacttgtattttgatgcgggtgatctgttggtgctggcgaaaacgaccgttcgaaactatgcgattgcgatcacggaaacggcgacgcccgagctcaggagagtgcttgttaaacaaatcaatgcggccattaagttgcatgaacaagttttttattttatgtaccaaagaggcttatatcccgcctataacctcgtcgacctgctaaaaggcgacgccatgcatgcgcaaaaagcgatatcgatgagataaaaaagccagcgaggatagaatcctcactggctctgttttttgctattttacgattaaaaccggacacttcactcttttcgccactttatggctgacacttccgagcaccatttcctgcaaagtgttcagccccctgcttccgataatcacgatatcaacatcatgatggttggcgtacgatacaatggccgggcccggatccccgtgctgcatcgtcatttgatagggaacggccgcctgttttaatttattttctatcgacagcagcctgctgcgccgttcgcgttcgagttctgtacggttttcgctatgcaggacttcatgttttgctctcgcataatccaatacataaatcatgtcgacgaccgcttcgtttgacatggaagccagatgaatcgcatgatcggcagctctttcagaatgcttggaaccgtcagcagccagcagtatatgtctatacacccttcatcacccgtttcttagtgatttgacactgaacgatgaggttgatcataggttgctaatttttcgaccagcttccagctggattcatttaatccaatcaagtcaacatctattccttgctctttcattttcaaaacgactttatcgatagccgccacagcggaatcatcccatatatgggcctcagaaaaatcaagaatgacctttttcgtttgctctcccgttttaaaggagtttacgaaatcttgaaccgatgcaaagaaaacttgtcctttgatgatgtacttgaccgcgttttcttctgacttttcttcaatttttagtttggagattttcgctacgaagaagattgcgcttaaaatcacgccggcgaaaaccccttttgataaatcgtgggtggccacaacggtaacgacggttacaatcatgacaatggaatccgtcagcggcacctttcttaacatgctaaacgaagaccagtcaaacgtcccgatcgataccataatcatcacgccagccaaagctgccatcggaatttgtacgacccagtcgcccagcaccatgattaaaaacattaagaagacaccggcaacaaaggtggacaagcggcctcttcctcctgattttacattgatcacagactggccgatcatcgcgcatcccgccatgcctccgaaaaaaccggcgacaatgttggcgatgccctgtccgcggctttccctgtttttgtcgctttccgtatccgtcatatcatcaacaatagaagaggttaataatgactcaagcaagccaacgatggaaagcgcaaaggctgttggaaaaataatggccaatgtctcaaaattgaaaggaatattgggaatcataaaggcaggcaatgattgcttcatttctcccaaatcaccgacagtgcgcagatcaaaatgaccgaaaatggcaaatacagtcatcgcaataatggcaacaagtgcagatggaacggcttttgtaaagcggggaagaacatagataatcaacaacgtaataccggccacaacatacgtcatattcgaaactccaacaaaatgaggaacctgcgccataaagattaaaatggccagcgcatttacgaaacctaccataaccgaccgcggaataaatttcataaagcgcgcaatcttcagcaccccaaatattaattggatgattcccgttaaaatcgtagcagcaaataaataatcaagcccgtgatctctgaccaaagttcccatcaaaagagccatcgccccggtcgcggctgatatcatcgccggacggccgcccgtaaaggaaatgacaacggcgatacaaaaagatgcgtacaaacctaccatcgggtctacacccgcaatgatggagaacgctatggcttcaggaatgagagcaagcgctacgacgatacccgaaaggatatccccccgtacattagaaaaccattcgctatttaattgtttaacattcaaagattcaacacctcgttcgtgatcatttgcttctaactctcatagaagccatctgtttttaacatgtttcactttagcaaacctgtatcaaaatgtctatatggttttttttgccgcggccgtttactccccgcactcccgtggaaataaacacgaagaaattaagaatgtaattttgaaaagagtccaatctaaggattagagggggtttcaacatggcgcaagagctggaaaaacggccggggcatacaagatggtatatttcttctttattaagcagcatgatcattttaaattactttgaccgtgttgccatttcagtcgcagctcctgcgatacaggattcctttcaattgacggcaacccaattaggcatcgtcttttccatctatacctactcatacacgctgatgcagattccggtggggagtctcttggataagtacggcgttgcctgggtgacaagggtcggaatgaccttgtggagttttctaaccattatattggcttttttacagggaaaactgcttctttatattgtcagatttttaatcgggctgacgagtgcttcagcttttcctgccgcatccaaagcaacggccttatggtttccgcctaatgagcgcggccttgccaattccttgtttgactcggcagccaagttcgcgaatgtcatcggcgcgcctctcgtagcctttttagttacgacattcgactggcgagccgcttttttaacgatcggaatcattaatgtactgttcaccgtatttttctggttgtattatgaacagcccgatcggcacaaacgaatctcaaaggaagagctccattatattcaaaagcataatgccgtatcagaggaagatatctcggaacggacgcttattgctttaaaagcgatgctgacaaaccgtaaagtatgggggctgatgatcggatttacgggttacggctatacattcaacctgctcttaacctggctgccgaccttctttaaagaaacatacggaatggacattatgtcctcagggctgtttacagcggttccctggctgatatcgacggtttccggaatcgttgtgggcggatggctcgtcgattttttaattcaaaaggggcattcgaatacaaaggtataccagaccattatcgtaatcggcatgagccttggatttgcctttctgggagctgttttcacgcacaacatcacgattgcgatcatttgcatttccgtcggcttagccggaatatctgcgaccgcgcctatcggctggtcgatatcagccgatattgcaccggttggttccatctctctgctcagttcaatggtcaatttggcaaataacttattcggagggattatcgcggtttcattaacgggctatctggtcgatgtgaccggttcatttacgctcagctttttagtagccggatttgtattactgctcgggctcgtgttctacctcgcagtcctcggcgatataaagcgaattcgtattggcaagcagaaaacctgaatgctgaaggaaacgacccggcttttgataaataaaaaaagaacaagaccgcattgggtcttgttccttttatcggcttactcgcctgctacgtatggaagtaaagccatttgacgagcgcgtttgattgcaacagtcaatttacgttggtatttcgcgcttgttcctgttacacggcgtggtaagattttaccgcgctcagagataaattttctaagaagatctacatctttgtagtcgatgtgcgtaatgccgttggaagtgaaataacacactttacggcgtttcgcacgaccgcctctgcgtcctcctgccatcgttatttccctcctttctgttctggttttattttattcgtccgtcatccattaaaatggcaagtcgtcatcagagatgtcaatcggctttccatcatttgcgaatggatcgtcattgaagctgttgccttgattgcgattctgattgttttgactgccgccgaatggagccggttcattttgtccgccgccaaagtgttggcctccctggcctccgctgtaaccgccggaaccagaaccgccgcctttaggctccagaaattgaacactttcagcttgaacttccgtgacgtatacacgctgtccctgctgattttcatagctgcgcgtttgcaaacgtccatctacacccgcaagacttccttttttaaggaaatttgcaacgttttcggcttgtcttctccagacaacacagttgatgaaatcagcttcacgttcaccctgctgattcgtaaacgtacgattgacagcaagcgtaaaggtggcaacagctgcaccgctaggagtataacgaagctctgggtcctttgtcagtctgccgactaaaacaactcggttaagcatattgagagaccatccttttgctttagagtatataattcaattctgtttattcttcttctttaaccacgatgtggcgaatgatgtcgtcactgattttagctaaacggtcaaattcttgaactgcttcagctccagcttgaacgtttaagatttggtagaatccgtcgcggaaatcgttgatttcgtatgcaagacggcgttttccccaatcttttgtttcagtgatctccgcaccgttagttgttaaaatgttgttaaaacgctcaacaacagcctttttagactcttcatcaacgtctgggcggatgatgtacatgatttcgtactttctcatttgtatttgcacctccttttggactaagcggcccattatattgggcaaggagcaataattctattactcacaattttatattatatcaaagctcttgtcctatttcaactgcgttatacattgaaacggaaatgaatgacatcgccgtctttaacaatgtattctttcccttcaaggcggacttttccggcctcttttgctgcggtcatgcttcccgcttcaagcagatcgtcgtaggcgaccgtttccgcacggataaatccgcgttcaaagtccgtatggatgatgcccgcacattcaggggctttcattccttttttaaatgtccaagctctgacttcctgttctcccgctgtaaaataagtagcaagtccgaggagggagtaggacgctttaatcagctgatcgagaccggattcttcaatgccgagttcttcaaggaacatcgccttctcttcgccttcaagctctgcaatttcggactcaatctttgcgcagacgacgatgacttccgcattttcagcagctgcaaattcccggaccttctgaacgtactcgttacctgaaggatcagccacttcatcttcgctgacattagctacatataagacaggttttgtcgtcagcagatgaagctgcttcaacaccttttgctgctcttcggagaactcgacagagcgggccggcttttcctgttcaaacgcctcttttaactttgtcaaaatctcaaattcaaacacggcttctttatctttttgcttggccatctttccgacccgcccgatccgcttttccacggtttcaaggtcagccagtatcagctcaaggttaatcgtctcgatatccgaaatcggatctactttcccggacacgtgtgtgatattgtcatcggcaaaacagcggacaacatggcagatcgcatctacttggcggatgtgggacaggaacttgtttccgagcccttctccttttgatgctccttttacaatgcctgcgatatcggtgaattcaaatgcggtaggaacggttttcttcggattgacgagttctgtcagcttttgcagacgctcatcaggcacctctacgatcccgacgtttggatcaatcgtacaaaacgggtagttggccgattctgccccggcctgagtaattgcattaaataaggttgatttcccaacgttaggcaaaccaacaatcccagctgttaaagccattgtttcatctcctctataatgaacatccgtgtgtagtcgtaaatgttaaacctgcaacaattataaggatgattacaataaaagacaagctgacaaaacttgcttttcaatcatacaaactagatgaaaattcatttttcattgagacagaaaaaaagcataaggaggtccgccaagattaactttcggactcctcatgcttaactaatatctttttcagctttctttgaaactctttgcgcgggatcatgacgctgtgtgaacagccctcgcacttgatccggatatccattcccatccgaatgatcttccagcggtttgtcccgcagggatgcggctttttcatttcgaccacgtcattcaggccaaattctttatcggccaacatcgttcacctctttgcttccttgttgtgaccttattgtacaaaaaaccacggtgaaagggcaattcttcacaatcttaactgtatttatttccatttactcaaaatcggatatagtaaaatatttaccaataaatataaattcaataatccgtaaattggatataaaaaagcgattaaatttgaaaatccgattgacgtaaaaggagccatgatcgagagaagcaggatgacgatcacccatctcggccagttcacaaaggacagaaaacggctggacagaccgagaatgctcgagatcgtcgtcgtatagattgcgacgcaaagtacagccgtcataaaaataaaaatcggaaaaggcgcgccctccaaaaccgcgaataaaggaatttcataatgggccagttcaccggcaagctctacaagggtctcattgtacatgtatgaaatagccccaaacaccaggccgcttaatatgctggcaatctttgcttctccgacccccttcatctctttgccgaccgcagataatacagcgacaacagataatatgttcagggaagtgaatgcgatgccggcaggccagttgtattgatgagtcaagttgagcagccacggctgatgatgagctgtttgaaaagaaatcagcgcatacagcagccccgccaccaaaatcgggattaagtagctattaacggacaatatgccattgagcccccacaaaaacaacaaccctgtgcataaacaaaacaagatgacgccagtccaaaacgggatatgaaagatttgcagcgttaccccgcctcctgcaatcatcacaatcgtcgtcgtaaacaaatacaggatgatcagcacatcgtatactttagccagcatcggaccgattaatgtttcgagcacaggcagaaaatgctctgatttttgttcatagctgatcttcatcacaatataggttgacaggctgaacatgatcgtaaacaacaggatagccagtccgctttcatcaccaaaaaactgccatatttcctggccggatgcatatcccgcacctattaagcttcctaaaataagaagcatccacttcatcccggctctccacacgatttgctcaccccaacaatatagtttttaagcttgtttctccgctcatgacactatattgccggtcctctataaaaattcatgaaacccttttcgacttttatcttacaaatgaataaattatattaatataacaaaatagaatatcgtatcctctcttagtaaagtattttttccggctgacaaaatcgactcatccaaagcataaaaaaagagacagctggatatactgtaaacaaccatacatactcaaaaaacacaccaaggcactgctgttaccatgatgacaaggatgtgaagcctatgaatcgaaaaggcggaattttttctcaagaaccaatgaatgaatatatttctcatacggatccgctagctgttaaacaaatagagaaagtcctttccgtctatttaaaggaagccggagaccggcccatcgtgatcgtttgcatcggtacagaccgctcgaccggagattcgctcggtcccctcgtaggaatgaaactctccgcaaagcagctgacacgttttcatgtctatggaacgcttgccgacccggttcacgccgtgaacttaaatgaaaagcttgatcatattcatcagcagcatcaaaatccttttatgatcgcgatcgacgcctgtcttggacgaaccaaaagcgtggggtctttccaaatcggcaaagggcctttgaagccgggagcaggcgttcagaaaagtttgccggaagtcggccacgtgcatattaacggaattgtcaatgtcagcggttttatggagtattttgtcctgcaaaatacaaggctcaatcttgtcatgagcatggcaaatgtgcttgcggacgggctgtcgcatctggaaaagaccggatcgcagcggcgccatgtgtcaccaattgaaagaatgaccggaagaatgtcataaaaaaaccatctgtacatgatcagatggtttttaagcttatgcgtcttcttgagccaataattcgagaatacgctccaagtcttcatttgagtagaattcgatttcgatcctgccttttttcttttgctttttaatggtcaccggtgttccaaaatagtttcgcaaatacgattcccgttccttgatcactgcatctttgacttgtttcggcttctttgtttcacgtggaacatcagcgttcaactgttgaattaacttttccaactggcggacgttcaactgttcggacacgaccttttgaacaagcggctcaagctttttcttgtttttcaatccaagcaatgttcggccatggcccatcgataacgtgccgttgtcgattaacttttgaacgtcttcaggaagtgtcagcagccgcaagtggttggcgatgtgaggcctgctttttccaagccttttcgccagctgttcctgggtcatatcgagatgtttgagcaaagattcataggcttttgcttcttcaagcggagacaggtcttctcgttgaagattttccaatagggcaatctccatcatcagggattccgacagctcgcgcacaatcgcaggaatggtttccaatccggccttttcagcagcccggaaacggcgttctccggccacaatgtcatagcctttaattgactttctgacgatgatgggctgcaaaacaccgtgctgcaaaatggactccttcaaatcttttaacgattggtcatcaaacgtttttcttggctgataagggttgggccgcaagtcttgcagcttgatttcctcaaccgtttcttcggataaatcaacatttgaaaacaatgcattaatcccttttccgagacctttaggcattcgcagccacttcctttgctaattctaaatagacttccgctcctctggaacggggatcatataaaatgatcggctttccatgactcggcgcttcactgagccggacattccgggggataaccgttttgtatactttatcgcggaagtactttttcacttcttcgatgacctgtatgcctaaattcgttcttgcatcaagcattgtcagcaatacgccgtcgatcatcagatccgtatttaaatgtttttgcacgagccggacagagttgagcagctggctcagcccttccagcgcataatactcgcactggaccggaatcacgacggaatcggaagccgtaagcgcattgattgtaagcagccctaatgacggcgggcagtcaataatcatgaaatcatagttttgtttgaccgattccaaagcccttttcagccggacttctcgggagatggtcggaacaagttcaatttccgcccccgcaagctggatcgttgcaggaatgacatccaagttttctacggatgttgttttgatgacatctttcacatctgcatcatctactaatatatcgtacacacattgatcaacatcagccttttcaacgccgataccgcttgttgcgtttccttgcgggtctatgtcgactaacaaaacccttttcccgatgtaagctaagcaagctcccaggttaacagaggttgtcgttttaccaacgccacctttttggtttgtgatcgcaataattttccccacaatgtcacctactttcacattgaacaagtttctctcatttctctattttaacaaaaaaagaatcggccgtttgctttttttgagtttttgttttttgaaagagatctgttttgtttatttttcgacaaaaagaaacagtttttttatcttagaaaaaagagaagaaacgctcaaataaagtgaaagatagttttaattttatatcagtataaaaaatcccccctgtgttggggggatttcaatcaatctgctgcgggcattttccgggtggcgatggcaatcctgttccaggcatttattgtgacagctgccatgatcagttcggctgtttcagcttctgtaaaatgggtcctgacttcgttgtatatttcatccggcaacccgtgctcgccgattcgcgtaacggcttcagtcagcgccaatacagcccgctctttttccgtgaaaaaaggcgcttcccgccacgcattgagcgcatatatccgctgttccgtttccccgttctgtcttgcatccttcgtatgcatatttaagcagaaagcacatccgttcagctgtgaagcccggattttgatcagttcctttaaaatggggtcaatgccagaagaagcctgcgctttttcaagctccagcattcctctgtatccctcaggatttactttttccattagaaatctcgtttccatgtctattcctcctttaagtgtttcacttatataacaagagagaaacggagtttgtgacaaaaaacgttatattttaatgtgcttcagtttatcgggatttgacacgataaacacatttttgacggaatcgccttccggattccaagcaaagcaaaccgcgtaagccgggcggttgtttttcatgatcaaaacgcccttttggtcgttgatatcgactggcataaagcggccggaaaagcttccctttgaaacaactcccgtaaaaaacgcataaatgcggctctttccatagatcggtctcaaagcgctgcgcacttttccgccgccatctgtatacaatacggcatcttcaatcaatttcttggaaaactcctcaaaattacctgttttcgctgattcgataaacagctgagccaattgctgttcttcaaccggctgtgaaaataccgaaatatcctcgtttaatttctgtttcagccggctgtggatttgacgacagttcgcttccgacttcccgataatggacgaaatttccttgtaatgatatccaaatacttctctaaacatcaaaacggctctttctacaggatttaatcggctcataactaccagaaaagcataggataccttttctttctcttcaacgtactcagccgggatttgagctgaaagcgccacctgcggttccggaagccattccccgatatatacctcccgcttcttgcgggcagactgcagttcatttatgcagcggtttgtgattgatttcgttaaatatgcttgaatatggtcaatttgaccgatatctttttcctgaaggtctgcgaacaattcttggatgatgtcctctgcatcttgaaaagacccgagcatacggtaagcaatcgaaaaaagcaatgaatgatattgtcgataatattccatagacgctcccccatagatattttgcctaaaaaaataaaagctctatagggagcttttatttcggtattcgaatcgtaaactgaatatattcttcaaattcctcttcttccgtattcagtttgacgccgctgtcttccaccattgataaggactggcgaatcgtattcatcgcgattctcgcgtccctgctgtacgcttttctctttggtttaggcttgcgtttatcctgctcaagcattttgacgacacggtcttcggtttgttttacatttaaactcttttcaatgacttcatgcagcagcttgacctgaaggtcgggctgtttcaacggtatgagcgctcttgcgtggcgctctgaaatttcttttttcaagatcgcttcctgcacctcttccggaagctttaacagtctgagcttattggcgattgttgactggccctttccaagcctttgtgcaagggcttcctgcgtcaaatcgtgaagctctaaaagccttgcataagcatgcgcctcttcaatcgaagataattcttccctctgaaggttttcgataagagcgacagaagcggtctctgtatctgaaaaatccttaataatagcgggaaccttctcccaatcgagcgtttgaaccgcccgccagcgccgctctccggctatgagttcatattggccttcccgctctgtttttctgacgacaatcggctggataatgccgtgtgtatgaatggttgcagctaattctttaattttttcttctgagaaaatggtgcgcggctgaaaacggttaggaattatatcgcctactggaatctcttgaatttcttctttattcgtatcatgttcagcaatctctgcttcttcttccttgtcgccaagtccgaagagacgagagaatgaatgcttcatgtacctacaccacctttaaacactgccatttttataattctattttctcatgaattttccttctgtgacatcacgaaatttgaagaaaacgaataatttaaccttcaataggagatttattaggtgttccaggctttcttggaaatttcttcggtgtctgcgattgttttttgatgacaatgatgtttctttcgctttcttctattggcagctgaaaagaatgtacggtttcaattttgcctccaagcgttttgatggcttttttgcccgtttcaatttcttcatcagccgaagcggcttttaatgctacgaataaaccgtcttttttcacaagcggaaggcagagctcgctgagaaccgaaaggcgggcgacagcgcgtgccgtcacaacgtcatagctttctctgtggtctttcgatcttccgaatgtttccgcgcggtcatggtaaaaagctgtgttttccagcttcaaagcgtctgacagctgattcaaaaagtgaatccgtttgttcagtgagtcaacgattgtgacgtgaaggtgaggaaagcagattttaatcggaaggcttggaaatccggcacccgctccaacatcacagagagtgttcatctttttgaaatcaacataaaaagaggcggcgatggaatcgtaaaaatgctttaagtacacttcttttttctcggtaatcgaggttaaattcattttttcgttccattcaacaagccattcgtaataagtctcaaattgctccagctggaaggaggaaagggaaatgcctttcttctccaaaccggctgtaaattgctcaatgttcatgccgtcaccctttctattccgcaaccttggcaatccgtccctgctctaaataaacgagcagtatggaaatatcagcaggattgacgccggaaatccgtgaggcctgtgcgacagacagcggtctgacctctttcaatttttggcgcgcttccgttgcaatgcctttgatcgcgtcatagtcgattctgtcaggaatctttttattttccattttctttagtttttcgacctgctgcaaggacttttcaatatatccttcatacttaatttgaatttccacctgttcggcaacgtcgccggcgactttttgttcaggcggcgcaagagcagtgacggtttcataattcatttcaggccgcttcatcaggtcggtcgcgcgaatgccgtctttgagctcgctgccgcccagtgaacggatatattcctgattttcctttgtcggtttgataataacagaatgaaggcgttttttctctgcttcaatggccgcttttttctcttgaaacttttgatatctttcttcagaaatcaagccgatctgatagccgatctcggtcaggcgcaagtctgcattgtcgtgacgcaggagcagcctgtactctgcacgcgaagtcagcaggcggtatggttcgtttgttccttttgtcacaaggtcgtcgatcaatacgccgatataagcgtctgagcggctgagaatgacctcttctttgccaagcgctttccggcccgcattgataccggccataattccctgtccggccgcttcttcatagcctgatgttccgttaatctgtccggctgtgaagagtcccggaatttttttcgtttccaatgtcggccacagctgtgtcggtacgatcgcatcatattcaatcgcataccccgcccgcatcatttgcacattctcaaggccgggaatagttgaaagcatttttcgctgcacatcttctggaaggcttgtcgacaatccctggacatagacttcctgggtgttgcgcccttcaggctcaagaaagatttggtgtctcggcttgtcgttaaagcggacgaccttgtcttcaatagacgggcaatatctcggtcccgttcctttgatcatgccggagtacatcggtgaacgatgcaaattgttgtcaatgatttcgtgcgtttccggacttgtatatgtgagccagcatggaagctggtctgtaatatattccaccgtctcatacgaaaaggcccgcggcacttcatcaccgggctggatttccgttttgctgtagtcaattgaatgactgttgacccgcggcggcgtccctgttttaaaacggacgaggtcaaagccgagctcttcaagatgttcagacagcttgatggacggctgctggttgttcggtccgctggagtatgacagatcgccaagaatgattttccctctcaaaaatgtccccgtcgtcagaacaacggtcttagaacggtactccgcccctgtctgggttataacgccccggcattccccgtcttcaataagaaggcgttcgaccattccttgcagcatggtcaaattcggttcattctcaagtgtctttttcatttcatgctgatattggaatttatcagcctgagcccgaagcgcccgaacggcaggtccttttcctgtatttaaaagcctcatttggatatgcgttttatcaatatttttagccatttccccgccgagcgcgtcaatttcgcggacgacgattccttttgcaggtccgccgacagacgggttacatggcatgaaagcaaccatatcaaggttaatcgttaagacaagcgtttttgcgccttgtctggctgacgccagcgccgcttcaacaccggcgtgtccggcgccgacgacaacgacgtcatattggcctgcttcatagcccatatgctttgttcctcctttattttcctaagcaaaattgagagaagagctggtcgatcagactttcgtgtacagcatcgccaatgatctccccaagaacttcccagcatcttgttaaatcaatttgaaccatatcgatcggcacatcgttttcgatgccctccaatgcgtcagtgatggcgcgcttcgcctcatgcagcagtgaaatatgccttgtattgctgacatatgtcaagtcgccgctctcgatcgcgcctgtgaaaaacagcgattgaatggcttcctccagctcatcaatcccttcctcttttaataaggaagtcgtcacgacaggctgattcccagccaattcccgaacccgatcaagatcaagcttttgctcaagatcggtcttattgacaatgacgatgatgtccattcccttcgttgcttcaaagagcttgatgtcttcatctgaaagggactcgctgtaattgaggacaagcaaaatcaaatctgcttcttttaatacctgtcttgaacgttcaacgccgattcgctcgacgatgtcttcggtctcgcggatcccggctgtatcgacgagacgcagcggcacgcctctgacattcacatattcttcaatgacatcccgcgtcgtgcccggaatatccgttacgatcgcttttgtctcgtggacgagactgtttaaaagcgaggacttgccgacattgggccgcccgatgataactgtcgagatgccttctcttaatattttaccctgctctgaagtcgtcagcagcgcctcgatttcctttttgacctttgtcgctttttcaatcagcatcttgtgcgtcatttcttcaacgtcatcgtattccggatagtcaatattcacttcaacgtgggccaatgtttcaagaatctcggccctcaaccgtttgatcagtgaagacagccttccttccatctgattcatggccacattcattgcccggtctgttttggccctgatgagatccatgacagcttcagcctgggaaagatcgattcttccgttcaaaaaggctcttttcgtaaattctcccggttccgccagacgcgctccctctctcaaaacgagctgaagcacctggttgacagtcacaagtccgccgtggcagttgatttctacaatatcttcccgcgtaaaagttttcggcgctttcagtaccgaaaccatgacttcttccacgactttttccgtttccggatcaacgatatgaccgtagttaatcgtatgtgaatcgacggaactcagcctttttccgcgaggtcctttatacactttatcggcgatcgcaagagcctcagggccgctcatccggacgatcgcaatcgccccttctcccatcggcgttgaaatcgcagcgatggtatccatggctttcacctctctttttcattcctatatctattatccccatttgccgggtcatcttccaaacatcgtatacggatgaaaaacttttattgtaatcaaaatttaaagataacatagtttcaattgaagtggaagtgacttgaaccgttatccacaaccgttctaagccatcattacttactttaacttatccacatgtgaataacaattaaatttcattttcatcaacagcttacgcctgaaaaaatagaacttaaactgattttgctgcatttcatcgattttcaacggcaaaaaaaccgaagccccaattttgggaacttcggttttcatgttattttttatatgagatgacaaggtgccggttatggtcttcaccggtagagtaagtttcgatatgctgcgagtagcccgcaagcgtatcatggatgaccttgcgctcactggaaggcatcggctccaggtgaatgtcttttttctgcctggccgcctggtcagcaagcttcaatgccagctgagcaagtgtttccttccgctttgcgcggtatccttcggcgtcaaccaccgcttggatatatctgtcggaatgacgattgagcacgagctgcgtcagcgtttcaagggcatttaaagtttgtcccctttttccaattaaaagagctgttttgtctcctttcaactgaaaaaccactcgtttagactcctcttctgccgtcacctgggcttgtattcccatattcgaaattacattttccaaatattgttttgcttctttaaccgggtctattttttcccgaatgttcacgactgcagaccgatgaccgaaaatgccgaataatcccttttttccttcatcaactacgtcgacttcgacatcatctgcatgaaggcccagctgttcaagcccggattgcactgcttcatcgacggtacgtccagtagcagtcagttccttcactttttcttacctccggatttttttcctccggctgccgcttcctgtctctcagcctttagatcaggccctttgataaagaaggtttgagcaatcatgaataagttaccgactacccagtacagggaaagagccgccgggaaactgatcgcaaatacaacgatcatgatcggcatcagccaaagcatcatcgccatctgcggattttgctgcgctgttcccgccatcatcagcttttgctgaatgaatgtgaacacaccggcgagaatcggcaaaatgaaatacggatcacgctccccaaggtcaaaccataaaaagctgtgttctgcgatttcccgcgttctcataatggcatgatagaatccgattaaaatcggcatttgaattaagatcgggaaacatccggcaagcgggttaaccccgtgcttctgcatgagagccatcgtttcctgttgaagcttctgctgcgttttttgatctttagaactgtatttttcacgaagtttttgcatttcaggctggagagcctgcatcgctttcgaactcttcgtctgcttgatcatcagcggcaaaattaaaagtctgattaagatcgtgacgatgataatcgctagtccgaagttttcattcgttaaatttgctacatacgtgatcagctgtgacaacgggtatacgatatacgtgttccaaaacccttcgctttctgcagtgatcggctggttgatttccgtacatccagctaaaagcacgataacgccgatcatactgaacaataataaaattcgcctcttcaacaacatttcctcctaaatcttcattcttcaaccggtattattcggttatgaccattaaaaagacatactttctcgtattttatcatctttctcccccgaatgggcgacgacatttttctggagctaaaggaagcgcttaaaaatgaggggccataacttcttttaacccggactatgatggctgattcggttttttccggtagacaaacgactttctgaaaagatgctgcaaactttttttcgtctcttcatatgataattcagctgcaggctttcttgcgatgataatgtagtcattttcttgttttaatagattccgctcttcctggatgacctggcgaatcagccgctttacccggttgcgcacgactgcgtttccgattttcttgctgaccgacagtcccacccgaaactctttcgcttcaggctggtgaagcacatataaaacatattgccggtttgccatcgattttccctttttaaatactttttgaaaatcttcatttttctttaatcgatttcgctttttcatatcttctttcactccgataacaagctggcaaatgggcctggtcattcctctatgtaaaaaagaccactgacattattcagtggcctaagctgataatacttttcttcctttgcggcgacgacgtgctaatacaagacgtccatttttagaactcatacggctgcgaaagccatgaactttgctgcgcttacggttatttggttgaaatgttcttttcatgtatgacacctccctcgaggaatagctgttaaagacagtctaatttattatattgggatgagcagttcattgtcaacttcgctcacacatttcttttttgcaccataataggataacacatatcaattttcttcgaaagcctaatttcatttttcctcaattttagcttaaaagatttttttggaagcgggaaaacgggatggacgaagcgaaaaaaagccaatgtggatatctttctcctcgttttttctatccacaatcattatcgacaacattttcacaaaactaaccgttgtggacaatatttcttcaacagtttgtatagtatgtggataagttcctcgcaaccattgcaaccactcgcttattctgatattatatttgtgttttaactcttgataacaaattggctgccaatccattatccacaaactgtggataagttgtggaaagttttttcacagggtgtgcagtattttgtccacatcttgtgaaaaatgtcgaaaagacgtttttctactatattatatgttttcaacatttcattaacgaatggactcatccatttgctctttttttgtgttctataacaggttggacaagcaaatattgctggtaaaggagggacgaaccgccattatgaaaaacatatcggatctttggaatcaagctttggggcagatcgaaaaaaaattgagcaagcccagctttgaaacatggatgaaatcgacaaaggcccattcattgcagggcgatacgctgatcatcaccgcaccgaacgagttcgccagagactggcttgaatcaagatacctgcacctgatcgccgatacgatctatgatctgacaggagaagaattgagcattaaatttgtcattcctcagaatcaaaatgaagaagattttatgccaaagtctccaatcaaaaaaatgtcgaaagaagaaccggctgattttccgcaaaacatgctgaatcccaaatatacatttgatacgttcgttatcggttcaggaaaccgattcgcccacgcagcgtctttggcagtggctgaagccccggcgaaagcttacaatccgctgtttatttacgggggagtcggacttggaaagactcacttaatgcatgcgatcgggcactatgtcatcgatcacaatccatctgcaaaagtggtttatttgtcatctgagaaatttacaaatgagttcattaactcgatccgtgacaataaagctgtcgattttcgcaatcgctatcgaaatgttgacgttcttttaatagacgatattcaatttttagccggaaaagaacagacgcaagaggaatttttccatacgtttaatacgctgcatgaagaaacaaagcagattgtcatttccagcgaccggcctccaaaagagatcccaacgcttgaagaccgtttgcgctcccgttttgaatggggattgatcactgacatcacgcctcctgatctggaaacaagaattgcgattttaagaaagaaagcaaaagcagaaggacttgatatcccgaatgaagtcatgctttatattgccaatcagatcgacagcaatatcagggagctggaaggggcattaatcagggttgtcgcatattcttccttgatcaataaagacattaacgccgatctggctgctgaagctttgaaagatatcattccttcttcaaagccgaaagtcattacgatcaaagacatccaaagaatcgtcggccagcagttcaatatcaagctggaggatttcaaggcgaagaaacggacaaaatcggtggcttttccgcggcagatcgctatgtatctatcaagagaaatgacagattcttctcttccgaagatcggcgaagaatttggcggacgcgaccacacgacggtcatccatgcccatgagaaaatatcaaaactgctgaacgatgatgaacagcttcagcagcagattaaagaaattaaagagcagctgagataagtgatgagcgggaaagtgtgaataacttgaacatggccttacacagtctgtccacatgtggataggctgtgtttccgttctttttttcacttatccacaaatccacagcccctactagtacttctgctatttttttaaaacataataattaatagattcccgcaaggaggatgattatgaagtttacaattcaaaaagaccgcctggtcgaaagtgtccaagatgtgttaaaagccgtttcttcaagaacgacgattccgatcttaaccggtattaaaatcgtggcctctgatgaaggggtctctctgacaggcagcgattccgatatttcgattgaatcgtttatcccgaaagaagacggcgatttagagatcgtgacaattgaacagcccggcagcattgtgcttcaagcccgttttttcagtgaaattgtcaaaaagctgccgatgtcaacagtggaaatcgaggttcaaaatcaatacttaacgatcatccgctccggcaaagcagagtttaacttaaacggtttggatgcaagcgaatatccgcttttgccgcaaattgaagagcatcacgcttttcaaattccgaccgatctgctgaaaaacctgatccgccaaaccgtttttgcagtgtccacctcagaaacacgcccaatcttgacaggtgtaaactggaatgtcactggcggtgaattaatatgcactgcaacggatagtcatcgtcttgcgctaaggaaagctaagctcgacattaacgaagacagttcatacaatgtcgtcatcccaggaaaaagcttaaccgagctcagcaaaatccttgatgaccatcaggagcttgtcgatattgtgattaccgaaacacaagtgctgtttaaaacaaaaaacgttctgtttttctccaggcttcttgacggaaactatccggatacgaaccgcctgattcctcaggaaagcaaaacgaacttgattgtcaatactaaggaatttctccaggcgatcgacagggcttcgcttttggcgagagaaggacgaaacaacgtggtgaaactttccgcagccgccaatgagtcgatcgaaatttcttcaaactctccggaaatcggaaaggttgttgaaacggtgaatgccgagcagatcgaaggggaagacttaaagatatcctttagtccgaaatatatgctggatgcccttaaagttcttgaaggagaggacattcatgtaagcttcacaggcgctatgaggccttttctgatccgtacgccgaatgacgattcgatcgtccaattaattcttcctgtccggacgtattaatttgttggaatagaaagttgccggctggtccggcagcttctcttattttttctggagaaaagcgctctcgccctgccttgattgctcataccgcaagtttcccctttccttctttccctgttttttagtacaattagatattagtgatattgaaagaggtcgatataatgacaaagacggtggctattgatacagagatgattaccctcggccagtttttgaaattggcggatgtcattcagtccggaggaatggcaaaatggtttttatcggaatatgaagtactcgtcaatgacgagccggataaccgccgcggacgaaaactgtatgtcggagatgtggtgacgattgaaggattcggttcatttcaagtcgtcggctaaaagcaggtggtattgattgtatatccaaaatcttacattatcgtcttaccgtaattatgagcgccttgaccttcaatttgagaacaaagtgaacgtgattatcggagagaacgctcaaggaaaaacaaatttgatggaagcgatctatgtgcttgcgatggcgaaatcccatcggacgtcaaatgataaagaactcatacgatgggatgaagactatgctaaaatagaaggcagggtcattaaaaaaaacggttctgttcccattcagcttgtgatttccaaaaaaggaaaaaaaggtaaagtgaatcatattgaacagcagaagctgagccagtatgtcggggctgtcaacacgattatgttcgcgccggaggatttaaatctcgtaaaaggaagtcctcaggtcagaagaaggtttctcgacatggaaatcggccaagtatcacctgtctatcttcatgacctttctctttaccaaaaaatcctttcacaacggaatcatttcttgaagcagcttcaaacgagaaagcaaaccgatcaaacgatgcttgacgtgctgacggaacagcttacggaattcgcggcaaaggttgtgatgaaacggcttcagtttgtcgatcagcttgaaaaatgggctcagcccattcattccggaatttcaagaggtctggaagagctgacgttaaagtatcatacgtctcttcacgtatcagattcgcccgatttgtcgaaaatgatcaatagttatcaagaaacgttttctaaattaagagataaagaaatagaacggggggtatctctttcaggtccccacagggatgatgttcttttctatgtcaatggccgtgatgtgcagacttacggatcgcagggccagcagcgcacgactgcattgtcgcttaaattggctgaaatcgacttgattcaggaagagataggagaatacccgattctgcttttggatgatgttttatcagagctggacgactatcggcagtctcacttgctccacaccattcaaggccgcgttcaaacattcgtaacaacgacaagcgttgatggaattgatcataaaaccttaaacgaagcggaaatctttcgtgttgaaaatggcacgctatcggactgaaaaaatggggtgagggattgtatatccacttaggtgacgattttgtcgtctcaacgcgtgaaattgtggctatttttgattacaaggcaaagacatcgccgattgttgaggagtttttaagcaagcaaaaacagcggattgtctcttctaacagcacgccgaagtcaattgttgtcacattacaatcgatttatttttctcctttagcctcaggcacgttgaaaaaacgggcgcaatccaagccggaaatcgattcataaagaatcttaactataaatttattatgtttgaagaaaagtgtaggtgaatgtgcgtggcaatggaacagcaaaataattacgatgaaaatcagatacaggttctagagggattggaagccgttcggaaaagacccggaatgtacatcgggtcgacaagcggcaaaggtctgcaccatttagtatgggaaattgtcgataacagcatcgatgaagcattggccggttactgcactgaaatcaatgtcgcaattgaaaaagacaacagcatcacagtaaaagacaacggacggggtatcccggtcggtattcatgagaagatgggtcgtcccgctgtggaagtcatcatgactgtcctgcacgccggaggaaagtttgacggaagcggatataaagtttcgggcggtttgcacggcgtcggtgcttctgttgttaacgccctttcaaccgagctggatgtaacggtttacagagatggaaaaatccattatcaggaatttgaacgtggcgttccgaaagctgatttgaaagtcattggagatacggaagtgacgggaacgaccacacacttcaagcctgatccggaaatattcacggaaacgactgaatacgactatgatacgctcgccactcgtgtccgcgaactcgctttcttgacaaaaggcgtcaaaatcacgatcgaagacaagcgagaaggaaaagaacgcaagaatgaatactgctatgaaggcggtattaaaagctatgttgaacacttgaaccgttcgcgggaagttattcatgaagagccggtctatattgaaggatccaaagacggcattacagtcgaggtggctcttcaatacaatgacagctatacaagcaacatttattcatttgctaacaacattcatacgtatgaaggcggaacccatgaagccggctttaagaccggtttgacgagggtcatcaatgattacgcgagaagaaacggcgtattcaaagaaagcgatccgaacttaagcggagaagacgtccgggaaggtttgacagcgattatttcaatcaagcacccggatcctcaatttgaagggcagacgaaaacaaagctcggcaactcagaagcgcgtacgataacagatgcgctattttcagaagcgcttgaaaagtttctgctagaaaacccggattcagcgaaaaaaatcgttgaaaaaggggttatggccgccagagcacggatggctgcaaagaaagcacgcgaattgacgcgcagaaaaagcgcccttgaagtgtccaatctgccggggaaacttgctgactgttcttctaaagacccgacgatttccgaactttacatcgttgagggtgactctgcgggcggatcggcaaaacagggccgcgaccgtcatttccaagcaattttgcctttgagagggaaaattttgaacgtcgaaaaagcccgcctggacaaaatattgtccaacaatgaggttcgttctatgatcaccgcccttggcaccggaatcggggaagatttcaaccttgaaaaagcccgctaccacaaagtcgtgattatgacggatgccgacgtcgatggtgcacacatcagaacattgctgctgacctttttctaccgctacatgagacagattatcgaacaaggatatgtctacatcgctcagccgcctctttacaaagtacagcaggggaaacgcgttgagtatgcgtacaatgaccagcagctcgaagaaattttaaaagagcttccgcaaaatcctaagccaggcctgcagcgctacaaaggtttgggcgagatgaatgcgacacagctttgggaaacgacgatggatccagaaacgcggacattgcttcaagtaacgctcaaagatgcgattgatgcggatgaaacctttgaaatgctgatgggcgacaaggttgaaccgcgccgcaacttcatcgaagagaatgcccgatatgtaaagaatttggatatttaatgattgtaagaccttattttcgcttaattgaaataaggtcttttctagaatgagcctttggcgctctagtcatttgatgtgtataaaatcaagattattgatataatggagaatagcctaattcgttgaagagtataaatacaaatctactcccacacaactcatgtagattctccagggaggttttttaatgagtgaacaacataagccccaagttcaggaagtcaatatcagtcaggaaatgcgcacatcttttttagattacgcaatgagtgttattgtttcccgcgctcttccggacgtaagagacggtctgaagccggtgcacagaagaatattgtatgcgatgaacgaccttgggatgacaagtgataagccgtataaaaaatccgcgcgtattgtcggcgaagttatcggtaagtaccaccctcacggtgattctgctgtttacgaagccatggtcagaatggcgcaggattttaactatcggtacatgctcgttcaaggccatggaaacttcggttctgttgacggcgactcggctgcggccatgcgttacacagaagcgagaatgtctaaaatatcaatggaaattctgcgcgacatcaataaagacacaatcgattaccaggacaactatgacggttcggaaaaagagccggttgttatgcctgcgagatttccgaacttgcttgtcaacggagcggccggtattgctgtaggtatggccacaaacatcccgccgcatcagctcggtgaagtcattgacggtgttttggcggtcagcaaaaaccctgatatcacgcttccggaattgatggagatcattcctggacccgacttccctacagcagggctgatcttgggaagaagcggtatccgaaaggcctatgaaacaggccggggatcaattacgcttcgagccaaagctcaaatcgaagaaacatcttccggcaaaccggtaatcattattacggaaataccgtaccaagtgaataaagcaaggctgatcgaaaaaatcgccgatctagtgcgcgataagaaaatcgacggcattacggatctccgcgatgaatcagaccgaaacggaatgcgcatcgtcattgaactgagaagggatgcaaatgccaatgtactgttaaataacttgtacaagcagaccgctcttcaaacatcattcggcattaatcttttggcgcttgttgacggccagccgaaagtattgagcttgaagcagtgtctggagcattatctcgaccatcaaaaagtcgtgatcagaaggcgtactgcattcgagcttcgcaaagcggaagcgcgggcccatattcttgagggcttgagagtggcgcttgatcaccttgatgaagttatttccctaattagaaattcgcaaacggctgaaatcgcaaaaaacggattgattgagaagttttctttgactgaaaaacaggcccaggcgattttggacatgcgtctccagcgtttaacagggctggaacgcgaaaaaatcgaagaggaatatcaaagccttgttgagctgattgcagagctaaaagcaatcttagcagacgaagagaaagttcttgaaatcattcgggaagagctcacagaagttaaagagcgctttaatgatgagcgccgtactgaaatcgtgacatcgggccttgagacgattgaggatgaagatctcatcacgcgcgagaatatcgttgtgactttaactcataacggatatatcaaacgtctgccttcttctacttaccgcagccaaaaacggggcgggaaaggcattcagggcatgggtacaaatgaagacgacttcgttgaacacctgatttcaacatccacccatgacaccattctcttcttctcgaataaagggaaggtgtaccgtgcgaaaggatatgagatccctgaattcggacggacagcgaagggaattccgattattaacctgcttgaagtggaaaaaggagaatggatcaacgcgattattccggtaggcgaatttgatgacgagtcttatttgttcttcacgacaaaacacggaatatcaaaacgcacaccgctttctcaattcgcgaatatccgcaataatggattgatcgccttaagcctccgcgatgaggatgaattgatcgctgtccgcctgacggatggaaataaacaaattattatcggcacgaagaacggtctgctcatccgtttccctgaaacagatgtaaggcaaatgggaagaacagcagccggcgttaagggcatcaatctgacagatgacgatgttgttgtcggcatggagattttggaagaggattcacacgtgctaatcgtaactgaaaagggctacggaaaactgacgcccgcttcagaatacagggtgcaaagccgcggaggaaaagggctgaaaacctgcaaaatcacagaaaataacggatctcttgtgacagtgaaagcaacgacaggagaagaagatttaatgatcatcacagcaagcggcgtgatcattcggatggatattaaagatatctccacgaccggacgcgtcactcaaggtgtgcgacttatccgcttaggtgaacaagagcatgtcgcgactgtcgctttagttgaaaaagatgaagagaacgattcagaagaacaggaagcggatgaatcataaaaacatgcagccaaatggctgcatgtttttctattcaatctttcaaatataatcttttcatcaggaacataatgtgctataatttctcttggtcgcttataaaaacaacaacaaaaactttttcaaaaaaagtattgaccgcttgtctcataaatgttatatttaagtggtcgctttgagagcggcagcgaagttctttgaaaactaaacaagacaaaacgtacctgttaattcattataaatcgcacatgtacctccgctgccggaggttttttgtttggaaaatatttaaatcaaaattttaagtgcaaggttattgacattctttattactttaactaatatttaatcttgttaactatttattttgttgtgcagaggtaaaaacaaatttaccgtttccgatctttcttgctcagttttgaacaacttattcagtacacgtcccgcaagctgctgagcaggaaataggaaaagcaaaaccgagggagccgttcaaaccggcttcacccaaaatataaggatatgaaaggagaaataaaacatgagcaaaggacgtttaattgcgacgaacattatcggactcatcatcgtgcttgccatcttagcaggaggtgcgtatttctattatgacagcatcagctatgtgaaaaccgatgaagcgcacgtggcaggcgagatggccgatattacggcgcctgcatcagggaagctcgcagattgggatttgaaagaaggatcaaaagtttcgaaggacgaaaaaacagcgaaaatcaaaggggaacaaacggttgacgtgaagtcgatcatggacggaacgattgtcaaaaacgaagcgaaggaaggccagatcgtacaagccggtcaaacgcttgcgaaaacaatcgacatggatcatctgtacattactgctaacattgaagaaaacgacctgaaagacatcgaaaaaggggacaaagtcgatatcgtcgttgacggtgattcaggcactacatttgaaggaaatgtcgaagaaatcggctatgcgacaaactcaacatttgacttgctttctcaaagcaattcaagcggaaactacacgaaagtaacgcagaaagtacctgtgaaaatttcaatcaaaaacccgtctgacaaagtgctgccgggaatgaacgcatccgtgaaaatttcaaaataaccgggggaaataaaaacgagcgaaaggaggatgtcataagtggcttctcagaaaaaaggaaatatgtcactgcttatcatattaatggccggcttgtttctggccattttaaaccaaacgctgctgaatgtggcgatgcctcatctcatgacagagttcaatgtgagcgccacaacgattcaatggctgacaaccggatatatgcttgtcaacggcgttttgattcctttatcagcctttctgattatgcggttcggcggacggagcctgtttttaacggccatgctgctgtttacggccggaacgctgatatgcggaatttcgcctaatttctcgacgatgttaaccggacgcctcattcaggcagtcggcggaggcatacttcagcctttggtcatgacgacgattctctttatctttcctccggaaagccgcgggaaaggaatggggatctttggccttgcgatgatgtttgctcctgctgtcggtccgactctatccggctgggtcattgaaaactacagctggcggatcatgttttacagccttgtgccggttggtgtcatcgtcatcattttcggttttttcctatttaaaaatatgacggaacctaaaaaaatcaaattggatacagcaggcgcgattctttcagtcgtcggatttgcggcgttgctgtatggcgtgagcgaagccggctcagacggctgggatgatccgatcgtactttctacagttgtgatcggtgtaatcggcattgccgcttttatcatccagcagttgaaatcgaaagaaccgatgcttgacttcagagtgttcaaatacgatatgttttcactgtcaagcgtgatcaacgccatcattacggttgctttgtatgccggaatgttcctgattccgatttatttgcaaaacctggtcggttttacagcgcttcagtcggggcttcttatgctgccgggcgcactcgtcatgcttgtgatgtcgccgatctcaggaattttatttgataaagtcggcccaaggccgctggcgattgtcggtttattgatcaccgttgtgacgacctacgaatttacgacgcttacgatcgatacgccgtatatgtacatcgtgctgatctatgcgattcgggcgtttgggatgtctatgctgatgatgccgattatgactgccggcatgaaccagcttccgcagcatctaaacagccacggaacggcgatgtcgaatacgcttcgccaaatcagcggttcgatcggaacgagcttgatcacgacgatttatacgaatcgtacgacattccactatgcatcaatggccgatcagacaaatacggctgatccgtcatttatgagcacattgcagtcaacgattcagtcaaccgcgcaatcgatgcatatatctctcgaacaagcacaacaatatgtcgtgaaatatttgaccggacaggcgcagctcaactcgaacgtcatgggtattaatgacgcgtttatgtgggcggccgggttctgtgtcatcggtctcgttctcagcctgtttttgagggatgtcagaaaagacaagctgcgcaggaagaacaaagcgcaggagctgacattgcttccggctcctaaagaagcgaaagaatcttaaaatgaggaggttctgacatgaaaatttatgttgtttacgacagtgaaggcgagcatacgaaaaagctggctgaagccattgcagaaggcgcgggggaacatgatgctgcagacgtgcggatcgatcatgtcagccaggcggatattagaaagctcgaagaaatggacgctatcatctggggatgcccgggccatttcggtacaatcagctccggattaaaaacttggatcgacaggctgggctacctttgggcggaaggaaagctgatcaataagatcggcgcagtcttctgcacaacggcgacgacccacggcggtcttgaggcgacaatgctcaacttaataacaccgatgcttcatcaaggcatgatggtcgtcggcttgcctggaaatgtacctgaaaatgctttatacgggtcttattacggtgcaggcatcacgtgtcctgtcgacagtgacgaattgatcggcgaggaaggcctggagctgggccgggctttaggcagacgcgtcgcccaggtgacagaccgctttacagcaggacagtgaggagcgatttgacatgaccattatactgaccatcatcgctgctgtcctcgtcattatcggtctggtggtatttaatgtgcggtcggcgtcttctcaggataaacccgaacatgaggataaagctgcatctgcggctggcattcctcaggttcaggaagaagaagagcctgagcaggttaaagccgatcagcaagatccgttcgaaatgaatgatcaaacctatcgggcgatcctgcaaaaacttcaacaaccaaaagaggaaaaaaaatatcccgagaagacggaaatggacgatatggattaccgaaacgcattaaaatccatgaaaaaacgggaacaggattaaaggcaaattcgctgggcaccagcgggtttgcttttttatttgcgctttttttgcaatattacttccgattccccccgcactactgatgcagtactctgatacagctcggtctggaagggaagacgcagctttagttataaattcgaacaacaatgcgttattgctgttgtataccaattgatatttcgcgccgtttattcattttcgagctgattgtcagaaacgttctgatccgaagcagcaacagcctgttttccgcgtcatttgcttctcgtcaatatcgctgtctgtttaggctgcgtgtttttttccacatgagtgatgttctttcgaacgatagatgagcgctcagaaaatattcggctatcaaaaaatcatccgggacatttccttgttgatctacgatgcttatggattattcgaggcgctgttcatcaagagcggcttattccagaaagtgcagagattctggagcatttctttaaatgctgatttcaaatttcatgatgaacagccagaaaggagacgaagaacgtctctatttaacagagcttgatatgttctgcgtccatttcgggtcaaggatatattcactattatgaaaccaatttttccgatttccgtataaacaaagcgtggaacctgttaaaggacaagaaaaatcgacagggatataaaaatcggcaagctttccaaagggaaccggggcaggctgaagctagcgctcacattggcgagcgatgcagcggtcgtgctgtttgatgaaccatccggtctccgatggtgagggagtcgacagtcaaaagccttcttacatatttggagcttgacaagcagacaatcgccatcgccacctatgaaattgaacaaatattggatgtcgtcttaaatggccgaattgaagcaaaaaaggatgtcgaacagctgcgcgaggaatccggaatgtcgcttttggaatggctgaaacggtttattaaagaaaaaaattgaaaaagcgggaggagaaacattggaaacacttttggaattaaaaaatgtatcaaaaacgatcagggggaaaaagatcatcgagggcttgagttttgacgtgcgggcaggcgagatattcggcttcctggggccgaacggcgccggaaaaacgacgacgatccggatgattgtcggacatatgagcattaccgccggtgaaatcgccgtgtgcggcgtcagcgtaaaagaaaactttgaaaaggctgcacggcatatcggagcgatcgttgaaaacccggagctttataaatttttaacgggctaccaaaaccttcagcaatacgcgcgcatgacgaaaggcgtgacgaaaaagaaaattgacgaaatcgtcgagctcgtcggattgaaaaacaggatcaacgacaaggtcaaaacgtattcgttaggaatgagacaaaggcttggccttgcccaaagccttttgcacgatccaaagctgttgattctcgatgagccgacgaacgggcttgatccggcaggtatccgggaaatccgtgactatttaagaaagctgacgagagaaaagggaatggcggtcatcgtttcaagccacctgctttcagaaatggagctgatgtgcgacaggatcgccattattcaaaacggaaagctccgggatattcagcatgtgcacggacccgctcgggatgagaagaagcgctattatattcaagcggacgacacccaggctctcacacgggaagcggctgctttcagaaaggtgaaggttgacgaagcggaaggcgggatagagctcagcattcaaaaggatgaagtgcctgatttgattaaacacttgacagacagcggtgttcgcttatatgaagtgaaggctgtgaacaaatcgctggaagaccgattcctggaaatcaccgcagataaggaggaagctcagcatgtttaatctcatcgtaaatgaatggatcaaaatttttaatcgaaaaggcacatacgtcatgatcggaattttgctgttagctgtcatcgggctgggcgttctcacaaagacgatcggagagacagaccaaaacacggactggaaaaaggaattggcgcaggaaaataaggacatgaaggaacagcttaaagggaacagcaatccaacacttgaaaaaaattatgaacagtcgatcgcaattaatgagtatcgaatcaagcacgatttaccggcagatggggattattcagctctgtctttcatcagcgatacgagcgggctcatctcgctcgccggtttgtttgtaatcacggtggcggcgggaatcgttgcgaatgaattcagctggggaacggtgaagctgcttgtcatcaggccgatcagccgctttaaaatcctgctggcaaaatattttacggtcctgcttttcgcattggctttgcttttcattctgttcgcaagcgcagggatcacaggccttgctttattcggggcaggcgacagcagccaggttcacttggtgtatgtcggtggaacggttgaagaaaaaagcctgctattgcatttggccggcagctatttgctgaattcgatttcgcttttgatgatggcgacaatggcctttatgatttcagcggttttcagaaacagctcgctcgccgtaggtatttcgattttccttttggttatgggcggaacggtgacaggcctgctcgcgacgaaatttgcttgggcgaaatacatcctgtttgccaacacggacctcactcaatactttgacggatctccggttgtttcagacatgacgctgggattctcgattgtgatgctggctgtctattttatcgtttttcatgtgctcgcctttgttgtattcacaaagagagacatcgcttcataagcggtatacgtttaaaaaaagcctgacaccggtttccgggcgtcaggctttttttaaatataaaaagactgctgacattcggtcagcagtcctgtatgaagatcagcggttcacagcttacgcttttgttacgttagcagcttgtggtccgcggtttccttcaacgatttcgaaagatacagattggccttcttccaaagttttgaagccttcgccttgaatagcagagaaatgaacgaatacatcgtcttgtccttcaacttcgatgaatccgaaacctttttcagagttaaaccattttactttaccttctagcatgaaatttcctcctaaagcgataacgcttaaattcactattcttgctctaaaacaaacttccaagacgaaaactcttacaaaactttcttcttaaagatagttcgaacaaaaataattacctttactttaccagtgtttaaacgaaattacaactgctaaacacaatttttttaaaaaaagtgaaatttaatgctcagggtgaaaaacaatgagtaaaaagggagtttttgaaattttcacgaatctgattgacaacatttcaaagaagctgtaaagttaggtaaaacttcatgcaactatacttcttattcagagaggcggagggaattggccctgtgaaacctcggcagcgggttctgcatacagcagaatactgtgccacatccaacaagccgtacgggcttggaagataagaagagagcggactcactctatttactttgtgtcgtcaaaggcttcttcttattttttaagaggaagccttttttgttagccctaaaagaggaggagatcatcatgattacatttgaaggcgttgaaaaggtctatgaaagcggcggacagaaggtccatgcgctcaatggaatcgaccttcatgtggataaaggggaaatatacggcgtcatcggcttcagcggcgcaggaaaaagcacgctgatccgctgtgtgaacttccttgaaaaaccgacggccggaaaggttttcgtcggcggaagagacttaatgtccctgtcgaaagctgagatacgaactgtgaaaaggaagatcggcatggtttttcagcattttaacctgttaaattcaaagacgattttcgctaatgtcgctgagccgcttgcgcttgttaaaacaccgaaagccgacataaagaaaaaagtgacggagctgctccgttttgtcggacttgaggataaagcccgcgattatccggatcagctttcgggcggacaaaagcagcgcgtcgggattgcccgggcgctggcgacaaatccggaggttctgctctgtgatgaagcgacatcagcgcttgacccgcagacgaccggcgatattttgaagctgctgaagcgcgtcaatgaacaatataacatcacgattctgttaatcactcatgaaatgaatgtggcaaaagaaatctgcgacaaagttgcggtaattgaaaaaggaagaatcattgaatccggcagtgtgtttgacgtattttccgcgccggaaaccgaaacggccaaaagctttgtcaaatcagccatcgaccacgagatacctgaatcgattcaaaaattaaatctgaagcacctctaccagcttcaatttgtcggcgaatcttctgggaagccttttctttctcaagtgtcaaagcggtatgacgtagaagtcaacattctgcacggaacgattacagagcttcagggaattccgtttggcagcatgacggtcgagctgcagggggaagatggtgaaatcgggcgggcgctcgaatatatacgcagggaaaacattcgcatcagggaggtataagcatgctagttacatatgaccaaatcattgacgcactggttcagacgattcaaatgacggttttttcgcttttattttcaagcgtgatcggcattccgctcggcattttgctggtagtcacaagaaaggggcatctgcttgagaatccggcagtttttacgtttgtcaatatgatcattaacattttccggtccgtcccgtttatcattttaatggttgctttaattccagtgacaaggctgattgtagggacgtcgatcggcacatcggcagcgattgttcccttgactttttatgcggggccttacatcgctagactcgtcgagaactctctgcttgaagtggatccgggagtcattgaagccgctgaagcaatgggagcgactccgagacagatcatcttcaggtttctgattccagaagcgctcggttcgcttgtgctgagttttacggtggcaacggtcggattggtcggggcgtcggcgatggctggtgcgattggtgcaggcggtcttggggatttggcgatcacatacggctatcaaagatttgacacgctgacgatgatcatcacggttgcaattctcgtcatcgtagtgcaaggattgcagacatccggaaacgttctgtcaaaaaaattgagaagaagatagacagagagggagacggctattatgaaaaaatttgcatgtgttgtgatcttcctgctgcttgcggcagtgatcgcggggtgcgcggcagactctgatgcgaaaaccattaaaatcggcatcagcggaacggatacgagaatttgggactttgtgaagaaaaaagccgaaaaagaaggcttaaagcttgaaatcgtcaaatactccgactatgttcagccaaaccaggctttggcgagcggcgacattgacgccaacgcttttcagacgatatcctactttaatgcattcaaaaaggaacgcaaccttgaattatcgccggtcggcacaacgatcatcgctccgatgggcatttattccgagaaatatgattcgcctggcgatataccaaacggcgcggaaattgccgttccaagcgaagcgacgaacatgggcagagccttgcttctgctggagtccgccggcctgcttcaattaaaggacggatttgacggaaatggaacgcttgatgcaattaaagaaaatcctaaaaaactcaaaatcacaacggtggccgcagagcaaacgccgcgcgtgcttgccgatgtcgctgcatccgtcatcaacaacggcatagcggttgacgccggcttccatcctgtcaaagattcgatcaaactggaagatgaaacagcgacaccgtacatcaacattattgcggccagaacagaagaccgggatcgcgaagatttgaaaaagatcgtcgagctgtatcaagcagacgacactgctgaattgattaaaaaagaatttgacggagcacagctgccgactttcgttcctctaaaagacatcggcgaataaaatgtcagtcgcgcaattgcttcccgggtcatatattgaaatacatcgataattcctacttgaccaatcaggtttgttgtactatagtttttaaatgtaaaaaattctgggggtgcttttgttatcatgacattatttgttgttattaatattatcgtcatgctcggcctgatggcgctcctttatatgatgcaaaaaaagcatgtttctttttctaagcgggtatttaccgctctgggaatcggaattgtttttggattcgctttgcattttatatatggttcgtcttcagaaacgattacgcagacttctgattggtttaatatcgcaggcggcggctatgtcaagcttttgcagatgatcgttatgccgcttgtattcatctcgattttgggtgcttttacaaagcttaagctgacgcacaatatcggaaaaatcagcggattgatcatcgggctcttaatcgcgacgacagccgtcgctgctgcggtgggtatcgcgtccgcgcttgctttcgacctgcaggccgtccatgtggaccaaggccaggcggagacaatgagaggggcggaactcgaacagaaatcgcaggacatggaagccaaaacgcttccgcagcaaattgtcgagcttcttcctggaaatccgtttttagactttactggagcaagaccgacatcaacgatcgcagttgttatttttgcggctttccttgggatcgcttatctcggggtcaaccgaaaacagcctgaacaagctgaacttttcaaaaaaatggttgatgccgtgtatgcgatcattatgcgtgtggtcaccttaattctgaggttgacgccttacggtgtattggcgatcatgacaaaaacgattgcaacgagcgacctcgacagcattgccaaactcggcaaatttgtcatcgcttcatatgcggcgctgatcgtcatgttcatcattcacctgctgctcattacattcagcggtttaaatcctgtcacatacttgaaaaaggcgtttccagttcttgtattcgcgtttacatcaagatcaagcgcaggcgctttgccgctgaacattaaaacgcagcgaagccttggtgttccagaaggcattgcgaactttgccggatccttcggactgtccatcggtcaaaacggatgtgccggcatttaccctgcaatgctcgcgatcatgatcgcgccgactgtcggccaaaatccgcttgatccgtcattcttgttcacggttatcgcagttgttgcgatcagctctttcggagtggcaggcgtcggcggaggtgcgacctttgcagcgcttctcgtcctttcggcattaaacatgcctgtagcgcttgccggacttctgatttctgttgagccgctgatcgacatggggcgtacggctctcaatgtcagcggcagcatgacgtcaggacttgtcacgagcaaagtgacaaatgagcttgaaaaagacacgtaccaagaccgtacaaatatcattgaagcagaagtgtaaaagaaaaacggcccgcacagcttgagagctcgtgcgggccgttttttatgaatagctttgatcgtcatcgaacatcgtctgagctgcagcctgatcgttcataacattcaccggagcagtcatatggcttgattgatgctggtcatttgccgtatggcctgactggcggtgttcatgtgattgtcctcccggattaaaagcctgcttgatcatgtcagccggattcatcatcgtctgattgcggccgcttccttgctgccgtcctctcatgccattcgcgaacatgccggtcaatcttttgcggatttcgggagaaaaagccgcggttaatgcagctgatcctaaaactaatacagcgggatggatgccagatcttcttctaaacaaagggtcaacctcctttttacgtataccatccccagtcatgatcggttttattcttcaaccttggccgcgtgatataagcggtgcttttcaaaaaattcgaaaatggcgcggtagactttcattttattttcttttttggaaaaaccgtgcccttctttttccaaaacgagatactcgatattccgctccatgttcctcaactgatcgacgacctgatcggactcttcctttacgacgcgcggatcgtttgcgccttggatgatcagcatcggctgagtcatattctccagatatgtaacaggagaatcggctttcattttttcataatcccgctccggattgccgacccatttttccatcatcggctgccagaaatcaggtacggttttgacgaacgaaaacaggttgctgactccgcatatatcgacgacggcgcggaaatactcaggatgcctcccgtggagcaaaagcgacatatatcctccatagctgccgcccattaaaaagagtttttcgcggtctgcaagcttttgatcgataagccagtcgatgcccgcggtcatatcgaggcgcggcccgtctccccaatcttgttcaaccattttaaagaatgaataaccgtaattcgctgatcccctgaaattaggagcgaataactggtaacccatttttgcagcgagttgaaagagatcgtagaacataaaggtttctgcatcttgcggtccgccgtgcggccaaataatcgtccagccgttcgcttctaccggggagggcttaaacagcagtccttctattggcaggccatcaaaagaaggatatgtcacaacttcaggataagacagctcctgttcggagaaacccggaaccgaatgtttcgttaattgccgccattttgactgtcctttcgttaatacgtagagattagtcggcctggtcggcgttgagccgagaatgtacagcgtaccagaataggcgcagtgtattttcgaaatggatgtgcaagggcaatcgatctgccggctttgccccgttgctgtgttgtactcatacatcacctctttgacacctttttttccaatgagataaaggaaagttccattcgggtcagcgtggatggatgttaaatcagttttatcaatcgaaagcaccggcgtaaaaataccggatgaaacagtgtacaaggcaagatatgagaactcggcttcgtagtttgtcgtgacgaataaccgatcatcagatgcaaaatgggaagaataaaccatgtgaggcagcgtctcatccgggaagattcctgtcgtcacgccttcagctgtatggaccatacagacagaatggctgttgacatagtagacatgtatgctgacggctttctcgcccgggcttacatcagacagcattgaagttccgtcttttccttcaaaaataagctcttctttttcagtgagacaatcatatctgtatgtatttaaaaatgtcggattgtcctttgtagaggagtagtaaactgcgttttgcacagggatgggggcgaagtggcggtctgtttgatttccgtttaatgattggaacgtcccgttttttaaagaaagcttgtacagtccgctttgttcgtttccgtcattgtcaaaaccagcataaaggattgagccgtcgggattgtaggcaattccttttgagtcctgattcaagaatgacagctggtacgggtatgtatcgggaagatccatcgcccacaggttcgatgttccgttgaggtttgtatcaaaaataagctgagtctcatcgggatgtaccgcaaagtctttaatgcgcagcgcatgcaaaatgctatccgctttttccatttcatatacacctccggatttatttggatattttttcgtccgttatgatcataacaaaataagcgtataaaaaatatattttagacaaataaataacacgaaaaagaaaaaaactatacgtaaatcattaaaggaggcaattttaatgttcaatatgaaaaaaggcgcgattgctgctttgctccttccgctgctgttcacagccggatgcggcatggcaaaccaaggggcagataacaaccggcgcaatcaggacaatgcgcttcaaaatgtaacaaacagagataacgacgctacgaatgtcaatgacggcagaaatgtcaatgaccgaatgaatgtgacagacaaccgcgatgccaatcgtgaagacaataatatggaagtggcggataaagccgcagataaagtggcggaacttaaagaagtcagtagtgcaaacgtgattacgacaaaccgcaacgcttatgtcgcggtcgttttgaaaggcaatccgaaaggcaacttgacgaatgagctgaaagggaaaatctcgaaaaaggttaaagaaacagacaataacatcaacaatgtgttcgtttcggcaaaccctgactttgttgaccggatgagaaactatggcgacagaattcaaaatggcgaaccgatcgaaggactttttgaagaatttggtgaaacgatcaacagaatttttccgaatcaaagataatgaaaagccgcaatccgcggctttttttattggctgctttcagacagggcacttcctgaatcatcccgcatagagtgtagtacagaaaagtatgatgcggatggagggataataagtgacgggggagatgaaagcagcctttgttttaatcatggcgggcgctctatccgctctgttattggccatttttgtcgtgttcagccaagagagccctgaggcggctgtgctttcgggaaaaaaagaaaaactgaaagaatcgctggaaatggtcaaatatgaaagtgtcagcatttattacgctgaaaaagataggccgattctggagctgacaaaggagacgcttcgggatgccgctgatatgaatcgggaactgtttgtcagtcctcttcaagacagcgttgatttgatctttttttcaaaccgcgatgatatggagtcattttcaaaattaaaggatataaccggattttattcaaacgatatgaggatgatcgggcttttgcccgaggagaggaagcatctgaataacggcgagggattcgccgtcttcctgtacaaacgggtgctggtgcatgagtatacccattatgcttttcacgtcaagctgagagaactgaatgccgacccgggaacttatccgctctggtttcacgaaggagtagctgaatgggcttctgctcatgacgcgatagaaatccggactttgccttcagtcgtccccttgagcaagctgaagaccgaccggcaatggcaaaaagcccggactggatatgaaaccgatatttatttgcaaagttattatttgatcgaagagcttgcggagaaaaaaggaaggggcgtcatcctcgacattatcgaggaaacggctgagcggggaagttttgcagacggatttaaggccgccgtcggccagtcgttgacaggttttgagaaagaatttaaacgaaaatacgaagcgaaaaaaacggcgttgaagtttcatcttcaatgccgttttcatgatcaatgaataggtctctgctgcccgcttggaggcatttgcggctgaccttgcaccggagcgaatgctgaagtcatcttctgcatgtcttgcggcgcaagctgaggaacttgatagtacccgtgtttgttttgataaaggaaaatttcataagccatttcgatatagtgaggaatctggtctgccagaacccttctgcagacagggtttgtcacttcgggagccgccatggccagcgacgaacaacaagttttcatcaagccgagcataaagctgctgatgcaggcgtcatcaatagcctgcacagattgcttcggttgtttcggctgggcatcttttaaaccgtagacgaatttgcggtcctctttcatcatatacgttgccgtttcctgactcggcttttgccccgttctgaaacattctgtcgtaatgttgtactgagacgaaataaaccgatgctgcctgtccaaaatgtcgagcagctccggatctttgacatgctccctgaacatcatatactgctcaaggacgccgatcattccggacagcacttcatgcatgtcgaacacttcgtgccccccgtgattcatatgctgcataccttcattgccttgattgatctgcatttgcggctggttttgctgttccactctaacgtatcctccttaaatgtaattcaactattatatttcgtttttgccgctatgtttattcaaaaaaggaataatcgataatctggatttaaagggattttattctaaccgtcgaatagtttagttcagaagaaaatattatgggggtcttgtattcaagacagcacatcatatcattggtcgaaaatggggataacggtcatcttggcgccaaactgagtattaggagaggaaattcaggccgattttgaaatccctcgcacctttgtaaacggagcacaatctgccgggcgatgatgaaaagttcacgcgtgtttccggcagtttagaggaattcggtgagtatatggatatctgatatccgaaaaacaatagggccggaacatggccggattcaaataaaggctgccggaagaataaaagacaatgtcggtctgtgtgctcatgcaccttttgttcagaaacgaccgaaaaacaattgaatagcaatgcccggctcgatatcggcatgaaagcatctggcttctaatgcctgcaactttttattgcccctgcgtgatctgtaaaggattctccctccgtaaacgatttcagctgccaatcatcatgaaatgcaaaaaaggtgttttcctttttgattttgcacttagaaaaggaggagttttataatgctgggctcaagtgagacggttggaaaaaagtcaggtttatttggtaatgattctgtgtatccaaaggtgcaaacagaagtatataaaaaaatcaatgaactgagtggttttcataggctggatgatatttatctttccttgatcgacaagtatatgtttccttgtctgatcctgaatgaccggggagaaattgtcgcgtcctcggaaagtgctgatcaatatttgaaaagctcaaaaggcagcattcatcaggtttttcccgcgagcttatccgtacaggtcaatgccgcgttacagcgggcgaagaaagagaaaaaagaagtatcgtttaaaaacgtcccgatttatttaagcggagaactatcctttgttcatttgagattaaaatgtttcttccgccagtatcacaagctttatgtgctgtttatcgaaaaagcacaagaaggggcagccaacgcgccggtatccggcggagaggacggccagcttcatctgcaacatctgtaccggacggtaaaagagctcgaagcgtccaacgatgctttagtgtccgcaaatcaaaagctgcaggaggaaaacagaaaattgacggcgctcaacagggcgtttgaaaagaaagtgaacgagctgaacacccttaaaaatgatatgaacaatctgctgaccagcacgaacatcgccgcagtttttttggatcaggaattgaaattgaaattatttactccagaagccgccaatatgttcgacctgaaaaacgaggacctttcaagacctgccgataagctgacagagaggtttaagtatgaagggtatgccgatgacttaaggcgcacgctatatgaaaacaagacggtcgtaaaagagtttgaaatgccagacggcggctggtatgccgtaaaaatgatcccttattatacatcgggaaacatggttgaaggcattgttgtcacattcacgaatgtcactgagctgaaaatgacaaacgaggcgctgcatatcagctcacaagctatagatcaaagtccggccaacatattgatcacttcggtcgacggttcggtcacttatgcaaacaaacgcttttgccggatgttcggaaaacatcaggatgacatcatcggcggcaatgtgtttgatatttaccgcaagcattttcactgtgaggatctcactcgcttctggaaacgcgtccttgaaaagaaaccatggtcaggagaacttaattaccaggatgaggagcagcaggacaggtgggagcaaatctcccttgttcctgttgaggacagcgcggggaacgttcagcaggttatgctgatatccgaggacattacaaaccaaaagcgatctgaaaaaatgctcatgaaatcggaaatgctgtcggcggtcggccagctagctgccggaatcgctcatgaaatacggaacccgctcacttctctgaaagggtttctccagctgatgatccaatccaaaaaatatcaaaaagactatgcggaagtgatgatgtccgaattcatcaggcttgaagcaatcatcaacgaatttctcgtattggccaaaacgaaatcgaatacatttgatccggttcaggtcaactcgattgttgaagatgtctgcatggtattggagtcgcaggccgtgctgaacaacgtaaggatcgagaaacagctgagcggagatctacctgagattctcgctgtttcaaatgagctgaaacaggttttcatcaacatattaaaaaatgcaatcgaggcgatggaggatgctgaaggctttattacgatacgttcctattttgaaaaagacagcgtattcatcacctttgaagatcagggaaagggcatctcaaaagaagtgctagaaaagcttggggagccattttatacaacgaaggaaaaaggaaccggtctcggattaatggttacatttaaaattattgaaaatcacggcggaagcattcatttcgaaagcgaagaaggaaaaggaacgatcgtaaaattgaagcttccgattaaagaatgagaatgcggtcatccctattctcattcttttttgaaatttttacaaaaaaatcatatagcctttataatcatcagataaatttgacaggaagcaaaaaacgggaggcgaatatatggtcaatgttgtaaagagccgttttatggctggtttgacaatcacgtttatgatgattgcgtcttttttgacgccgtttgcggacgtaacgcacgcttcagaaacgatttcagtagaagaagccattaagcataacgaagggcatgcagccgttgaaggctatgtcgtcgggcacacaatatcgagcggccattatcgtttcagcggaaatttcgctaacgattataacgtcgcaatcgctgataaaaaggaggaaacatcacctgagaacatactccccgtgcagatacccgcacctttcagagaccagttcggtttaaagacaaaccctcatctcatcggaaaaaaactcatcatcgaaggcgaacgcactacatattttaattccccgggtttgaaatctgttcaatccatcacattttccggagacgatgcaccgtctgcccagccggagaccaaaacgatagccgaagcgcgcaagcttttaaatgaaacggtcaaaatcaaaggaatcgtcactgccgatcaggcggctgtcggaggaggaaagctgtccacatttatccaggacgatacggcgggaatcaatatctattccgctgcgcaaggcgattttccggaactaaaagagggtatgtctgtttcggtcacggggaaaatcacgacatacaaaggcttgacagaaatcgtacccgcaccgtcaggcattgaagtaaccggagaaggggcggcactgcccgaccctgttccgctgactattaaagatgtgctcgatcagggaaccgcagctgaatacgaaggccggcttgtgaggatgaaaggctttattgaaacaaagccggatgcgccggcaggcggcggctataatatcacaatgatcgatgaaaactatcatccgctcacactaagggtgatggaacaaacgaatgccgccgcttcgatagaacaaggacaatggtacgagattaccggcatattaagccgctatgattcggtgcagcttctgccgagaaaacaggaggatcttcggaaattagacggcgccgcgcatcctccccccgctgctgaaggggaatacgaaagcgttgtggaacgagtcgtcgacggggatacgatccacttaaaagagcctgttctcggatctacaaaagtccgctatgtcaacatagatacagccgaaacttatcataagccgaaaaatgaattagatgaaaaccagctgcagcacggaaacaaggcgaaggaatatttgcagtcgatattggccccgggagacaaagtcaccgtgaaagtgggcaaggaagcaaaagacagctacggccgcctgcttgcccaagtcatcactgaagacggcgtcaatacgaatttgcagcttgtccaaaaggggatggctgtaacctacttcatttggccggttggaagtgatgaagactatcaattgtttcaaaacgccgtcaaaaaggcgaaaggcgataaaatcggcatttggaatcccgctgatccgctcctcgaaatgccgtttgaatttcgcgccagggagcaaggcaaagggctgacgcggcatgtcggagactctgcggaaaatacgtatgtcgcgcctgaaaagtggcgggagattccggtggaaagacgaattttctttgcgtcggctgaagaagcggaagctgcgggctattcgaaaaaagagcaaagcggcaatattccgctgcgcctgttaagcatgaatgatctgcacggaaagatcgatcagcaatatcagctcgatctaaacggcgatggccggacggatggaacattcggcaggatggattatgcagcatcattgatcaaagagaaaaaagccgagcaggaaaacacgctgatcgtccacgcaggcgatatgatcggaggaagctcgccggtttcttccctgcttcaggacgagccgacagttgaagtcatggaggaaatcggatttgatgtaggaaccgtcgggaaccatgagtttgatgaagggaccgaagagctgctgcgcatgttgaacggaggcgaacaccctgaaggcaaagggacaaaaggttacgacggacaggatttcccgcttgtctgcgccaattgcaagttgaaggcaagcggggacagctttcttcctccatatgaaattattgaagttgaaggagtgcctgtcgcttttatcggcgttgtgacacaggcggccgccaatatggtcatgccagaaggaattcgctcaattgaatttacagatgaagcaaaggccgtcaaccaggctgcaaaagaactgagagcgaaaggtatccgggcaatagcggtgctcgcccatatgacagcttcacaggacggcggggttgtgaccggcgaatcagccgaacttgctaaaaaagcagatcccgagatcgatgtcatctttgccggccacaatcatgaagtggtcaacggccaagtcaatgatattttaatcgttcaagcatacgaatacgggaaggcaatcggtgtcgtcgatcttgaaatcgaccgggaaacgaaagacatcgttcacaagaaagcggaaatcgaatatgtgaatcaggaaaatctcaagcccgatccggcggtcggtcagatactggataaatatgagcggatggttgcgccgatcatcagcgagaaagtcggtgaggctgcgcacgatatggccggcggctattcaaatgacggagacacccctctcgggaatctgattgctgacggtatgcggcaagcgatgaattcagatttcgcattaatgaacgggggcggcatccgccaagatttaaaaaaaggaacgattacatggggagacttgttcaatatccagcctttcggcaatgtactcgtccggcttgaaattaaaggcagggatttatacgatattatagacgcgcaaatatccccatcttacggcccggattactcgatcagcggcttcgcttatacatgggacccgaaaacaaataaaaccgcggctatttttcttgaagacggaacaccgattgatttagaccaaacatatacgctgaccgtaaacaactttatggcatctgcttcaggaagcaagtatttgccgatttccaggcttggaaaaaatccggtcacaggtccggaagatatcgaagccacagtcaaatttgtcaaaagctttaaaaaaccgatcgcttatactgccgaagggcgaatcaaaaaattagcagaagatgattcgcgtccgggagaacagcccggacgcggggctgatccagatgacaaagaaaaacccggaagcggaggcgctgatccgaatgacgaagaaaaaccgtctggtgataagggcgatggggggaaacccggcaatgacaccggagaaagtccggttcatgacggtaccggcaatgcttcaaggagcggcgctattcctgttgcgggcatgacgaccggtgaaggatcagatgcgcctgcggagaagatggacggtctgtcaaatgatgcgtttctgccagacgagcgtgaagagcgcaagctacccgatacggcggcagcttacggcggtttccttttatacggcttcctgacgtttatgttcggagcgattctttatatgcggaaaaggggtattgcgagactatgaaagtcaagatgttatcgtttctgctgatgatagcggggcttgccacttttgcatacggcggctggaaaatattcgatatgaacagacagacggatctttctttaactgaagcaaaagaagccattgcatcgagtcaatccgcccgttcggctaagcacccatcggcgcccgcttcatttaagcccgccgccggcgaagcggcaggcatactccatattcccaaactgggcgcagagcttcccatcgttgaagggaccagtcccgatgatttggaaaaaggcgtcggtcattataaaggcagctattatccaaaacaaaacgggcaaattgttctttcaggccacagggatacggtttttcgcagaacaggggagctggaaatcggagataagctgaaaatcgagcttccatacggaagcttcgaatatgaaatcacacacacgaaaattgttgaccaaagtgacacgtccatcatcacgctgcagcgtgaaaaagaagagctgctgttaacgacatgctatccgttttcttatatcggaaatgcgcctgagcgctatattatttatgcaaagccgctgaaaggatgacaaaatcccaaaacaaaaagccgttttgggattttgtcaacaatctgtaaggctgtcccatcgaggacagcttttttaccgtttaatcaaccgtgccgaacagtcgtccgatttcgtcttttaaatcatccggaagcggtgccgcgacagtgacacgttcttttgtgatcggatgggtgacattgatctcgattgcgtgaagagcctgtctctgaaaaagcccctttgaaccgccgtataaggtgtcgcctgacaaaggatgaccgatgcttgcaaggtgaacgcgtatttggtgggttcggcctgtctccagctgaagtctgcacagtgtaacatcgtgacggctgtcatatcctttcgattcaaaatgggtgacagcgggctgtccggaatgggacacccttcttctgacggggtggtgcttgtctctgccgattggcgccgaaatggttcccgttttttttctgaatttcccttccgctacggctacatatgtccgcgccagttcttttctttgcagctgttcgtctaaaagcgcgtgggcgaggcggtgctttgcaaaaacgacagcgccgctcgtatccttgtccagacggtggacgtgccggacttttcgctcctccccgttcatttgaaaataaaacgccacaaggttgctcagcgtgccggtctggccggcttcattcggatgagtcgccattcccgccggcttattgacaataagcatgtgatcatcttcaaacaggacgggaagttccccgtattcagggacgattccgctttcttcctcctctctgagatcgatcatcacgctgtctccgctctccagccgaacgttatgattcaccgatttatgattcactttaactttctcgtttgcgatccagtattgaatgacaggcttcgatgctttcgcctctctttttaaatatgcatataaaagttcgccgtgatgccgtatgtctgcactgaagaataagccgtgatttttttggttcatttttactgctcctttctgtaaaaagcgttcaggaattaggaaacacttacctccacagcccattgtttatgtatgctattctgtttgaagagatttgaacaagggatgaagggtgatcgatttgcgaattgtaaaggcagcaactgaagaacaagaaatttatatcgaagagcttgtatcagagctgtatcaaatatttccattgtacttgaataaacaaaaaataaaagaactcaaaaagcagggcgcgcttcaattgaaagaggatgaatacaaaggaacgctcgatgaagcgtttcagattatgacaagcctgcaattgatccatgcattattaactaaggcgaagcgcaagtgggtgctcaaagaccgtgatctgttcgataaaaatagccgcaagctgaatgactgcggtctgtacttccctctaacatctgccgactttcatatcgtgaataccgagaataaaatgctgatgtaaaaagccggctaactgaagtgaaagagcttgttccaaatcggaaaaagctcttctttttatgaaaagatgatataagaaaaaagcggaaaacacaatgaaatggtgccaacttcctttttagcatgtgcatgacctgtacatactaacaaccgaaaggggtgcagtctattgacgacaatcagcaatgcgatgtctagacaagtggcgacaatttcttccaatcaaacggttcaagaagcggctgagttgatgagccgccataatgtaggtgcgattccggtcgtagatcaaggcgtattaaaaggcatgatcacagaccgtgatatcacgctcagaacgacagcggaaggccaggacggacagacacctgtttcaaacgtcatgacaacaaatgttgtttcaggaaatccgaacatgagccttgaagaagcatcacagctgatggctcaaagccaaatccgccgtctcccgatcgtcgaaaacaaccatttagtcggcattttggcgctcggggatctggcggtaaacgaattgtccaatgaatctgccggacaggcgcttgcgaacatttccactccggcacggactcagtaagaacggaagagcttgcctcttacagcaggctcttcttcatttatacataccggtttttagtgtcttctcttttcaaggagcggcaagaaggatacaatgaatggtgcaaacagtcaaaaggagttgggctaaagcgcaatgattaaagcagtgatttttgattttgacggtcttattttagatacagaaacgcacgaatatgaagtgctccaggaaatttttgaagagcacggctcagagctgccaatgtcggtttggggaaatgtcatcggcacggccgccggattccagccgttttcttatctggaggaacagctgcaaaaaaaactggaccatgaacaactaacgaaattgagacaagagcgttttacgaaaagaatggaaaatgaaaaagcgcgcccaggtgtggaagcttatttgtccgcggcgaaagagctcggtttaaaaatcgggctggcgtcaagctcagattataaatgggtgtcccagcatttaaaacaaatcggtctgtacgatgatttcgaatgcatcagaacggccgatgatgttgaggaagtcaaaccgaacccggaactctatttgaaagcggcggaatgcctcggtgtgaagcctgaggagtgcattgcattcgaagactctgtcaacggatcaatcgccgcgaaaagagccggaatgaaatgtgtcattgtaccgaataaagtaacgaaaagcctgctgttcgagcattatgaccaccgcctggaatcaatggcggaaatggagctggaacagctgatcgaaaaaatctccgatccatcataaaagccagaggaggaatgggacgtgtccgaaaaactggatctttcccgctttgaaaaaaagatcgtcatccgcaatattgaagaaaaagatatcgacagcatcatcgggcttcaagagctttgttttccgggaatgatcccatggaaacgggagcatctggaaagccatttggaacacttcccggaaggccagttttgcgcagagcttgacggagaagtgatcggttcctgttcaagcctgttgatcaactttgatgaatatgacgacagacatacatggcaggatattacagacgacgggtatattacgaatcacaatcccgacggcttaaacatgtacggcatcgaggtcatggttcatcctgaatacagacggatgaagatcggccaccgtctctatgaagcgcgaaaagatctggcaaggcgcttgaatttaaagagcattatcatcggcggcagaattccgaactatcataagtacgcttccgagatgacgccgagggagtatgtcgaacaggtcatccaccaccagatatatgatccggtcctttcgttccagctgctgaacggattcaccatgatgcggatcaacccgaactatctcccggatgacagagcatcaagcaaatatgcgacattgatggagtggaataatgtcgactacttgccgcagacgaagcgctattacaaatcagcttttccggtgagaatatgcgtgattcaatatgaaatgaagcagatccattccttcgaggagttcgccaaccaagtcgaatactatgcagatgtggcttcagacgcaggagcggattttgccgtctatccggaaatctttacgacgcagctgatgtcgtttctggaagagcgctcaccgagcctggccgttcagcggattaccgaatatacagaagactatatcagcctgttcacagaccttgccgttaaatacaatgtcaacattatcggcggttcccacttcgttgaagaagaaggaaagatctacaatatcgcttacttgttcagaagggacggaaccatcgaaaagcaatataagctccatattaccccgaatgaacgaaaatggtggggcatcagcaggggggacgaagtgcgcgtctttgacacagactgcggcaaaatcgcgatccagatctgctatgacatcgagtttccggagctaggcagaatcgcaaccgaaaaaggggccaagattatttttacccctttctgcacggaagaccgccaaggctatttgcgagtcaggtactgcgctcaagcaagagcggttgaaaaccaggtgtacacggttatttccggaacggtcggcaatctgccgcaaaccgaaaatatggatattcaatacgcgcaatccgcgattttcgctccttcagattttgaatttgcaagggatggaatcgtcggcgaatgcaatccgaacattgagatggtggtcatcggcgatgtcgacctggaaattctcagaagacagcggcaggacggaacggtccggcagctcaaggacagacgccatgacatctacaggattcattataaaaaatagcagattcgggtgccggccgcttgaggccggctttttcctgttgactttcagctttatttttcatatattgtaactattaaaaggaggtggaaaagatgaatcaaactggtaagcgcatgacggatatgcaagcccatctgtatatttgtcgcgcgattttttccggggaatgcgtattacgggatcagtctgcccttttttacacattcaattggaaaaaataccagtgagagacatctgcccacaatcggattttctgatgctgacggcggggtgtaagctctgccgtctttttaatgctcggtgtctcttcacgggatgcggaggaaagatggatgattatatgcagtttgcaacatgtcggtcaaacttacggaggacatacgattttcaacgggctgtcatgggacctgcaccaaggggagcgcgtcggtctgatcggacgaaatggggaagggaaaacgacgttgttgaagctgatcagcggccaaatgaaacctgatgaaggtcttgtgacatggaaaaaaggattatcaacagggctcttggagcagaatcccgcatgggacggcagcaaaacggtaaaagagctgctgtatgatgttttttcatcattatggaacacacagcagaagctttcccgaatcgaacgtcaattggcggttgaaaaggacgcggaaaaactcagattccttttggaaaagtacggggctttgcaggatgaatttcagcgaaaaggcggctacggcatcagcgcgcaaatcgaacgggtggcgcacggcttgaatatcgagcggctattcaatgccgagtggcgggagttaagcggaggcgaacggacgaaagcgggtcttgcaaggcttctcctgtcagctccggatctgcttttgctggatgagccgacaaaccatttggatttaacatcgatcgaatggctgccgtcttttttaaagcagtacaaaggtactgcggtcattgtgtcgcatgatcgctatttcctggatgaatcggttacttcgattctcgaaatcgaccaaggagagcttcacttttcaaaaggcggctatacacactatgctgatgaacgggaagagcgccttatgagagaatttcatgactatcaggatcagcagaagaaaatcaaaaaaatgaaggaaacaatcaagcggctgaaggaatgggcgaatcgcgccaatcctccgaatgacggcctgcaccgaagagcgaaaagtatggaaaaagctttggagcgcatggagaaggtgaaaaaacccgttctggaacgcaaaaagatcgacttagttttcagcatggatgaacgaagcggaaaagatgttgtcaggcttgaggatgtctgcaaaagcttcggtgagcggcagctttttgacaatctcagtatgcatgtccgttttcaggagcgcgccgccatcgtcggagagaacggcagcggcaaaacgacgctgctcaacatcatcagcggaaaggaaacgccggacagcggtgacgtgcagcttggcagcaatttatcggccgcatatctgactcagcatgtcggtgaaatggaggaagagcgcaccgttttagccgaattccgtgaacatgtttctgcatcagaaggcgaagccagaatgatgcttgcaaagtttttgtttttcggccaatccgtcttccgaaaagtgaaagatttaagcggaggcgaacggatgcggcttcgcttggcacagctcgttcaccaaaatcataatgtgctgatcctcgatgagccgacaaaccatttggacatcgaatctaaggagatgcttgaagaagcattaagccaatttcaagggacgattattgcggtttcgcatgacaggtactttcttgaccggcttttcaatgtcatctggtggcttgacggcagaaaactcgtcaagtatgaaggaaactatacattcgcaagggagaagcggcagcagggttgacacatttttatcacatttgataagatgttgctacagttatagaagacaaaagcaatggaatgtatgcacgaactgtatatattctctttcaatattttaattctgcttgattttgttgtatgggtatgcatacaagttaggcagcattcgaacgcctgttgacacaggttatttgagtgctgcctttttttattgtctttctgccataactgtgagaaaagaagggataatggaggggtttagttagtatggcttttcgaaaaccggatgaaatagcgaatgcagcaattgaagcagggatgaaaaaagtacagctcccgctgccgtctctgcttgtattggggtttttaggcggcgcatttatcgcgcttggttatttgcttgatatcagggtaatcggcgacctgccgaaagaatggggaagcctgtccagcctgatcggagctgccgtatttcctgtcggtctgatactggtggtgctcgctggcgctgaattgatcacagggaatatgatgtccgttgcgatggctttattttcaagaaaaatatcactaaaacaattggcggttaactggggaatcgtcacgattatgaacttaatcggcgcactgtttgttgcttactttttcggacatttggttggattgactgaaacaggcccttatttagaaaaaacgatcgccgttgcacaaggaaaactagatatgagcttcggcaaggttctcatttccggcatcggctgtaactggcttgtatgtcttgcggtatggctttctttcggcgcacaagacggagcagggaaaatccttggcatctggttcccaattatggcgtttgtggccatcggatttcagcacgttgtcgccaacatgtttgtgattcccgcagccatttttgcaggctcattcacctgggggcagtttatcggaaacatcattcctgcttttatcggcaatgtcatcggcggagcggtgtttgtcggtctcatttattttattgcatatcctaagaaagaccgctccagaaaagaaatgaagcaggtatcatgaacaaagggcaaatccgctcgataaaacataaaaacgccatttttataaaaagatgattaaaaatagaaattggcggtatgtcccgcaggcagtagaggcattggtgtcttcttttgtctgcggtttttatttgcctgcggcagcttcggttgaagcggatttgagaggggctgagcgatatgatgattaacaaacggtttaaaaatccgtaagaattcgaaccgagatcagctacagtacgactgatccggaaagtggaggggtttttacttagaccaccgaacaacggatatggacattcgccgatgcctatgtcccgcctggaaatgcccatgatttctgtgccctgtcttgaccggttggatcaccaaattgctcctcacagccgcatgccagaacatgaagtagattgcatttacctagccaagcggagttaggtatgtgggagctcttactgtatttaaaatccgatgaatacctagagaaacaccgttgaaaacaaacgggtttttctatatgattgatagtattaatgagaacggttatacataaaaagaaggtgcatcatggagtttctgtttgttttactgccggttttcgggatatttgcgatcgggttcatcggacaaaagctgcttcattttgatattcagaacctatcgaaaatgtccctgtatttaatgtctccgtttttagcgtttgatacgttttatgagaacaagctgacgatggattatatttatatgtctgtctattgtctcggcctctgtttaactttgattctatttgtctacctcatttcatatgttcacggatattccaatcaggagcggtgcgctctcgttttatcatccgctttcatgaataacggaaactacggaactcccgtcgtcctgcttgtctacggcacggccgggcttgatatcgccgttgtgctgatggttcttcagcagcttgtcatgagcacgattggcatgtattacgcagcgaaaggaagcccagaagcgggcggatttaaaatcgtgatgacgagggttatccggatgccggtcgcatacggtgcgctgctcggcatatgctttcagctggggcatatttcgattcccgaacagttaatgacaggaattaaattggtgggagatgccgcgattccgacgattatgattattctcggcatgcagcttgcggtgatttcctttcaacatatcgaataccggaaaatttcttactcgcttttgctgaaattattcgtgtctccgctcattgccctggggtttgcgctgattcttccggtcgacgggctggtcaaacagatcatggtgttggcggcggccatgccgacggcggcgaacacgactttgatggccgtacagtttgaaacaaagccggaaatcgtttcaagcgcgacttttatcagtacaatgctcagcatcgccacccttccggtggtgctgtggctgctttcattatggggctgacctgaatttttctttcaggcggccttttttctggcgataacaaagggaagcttgcaccgcttaaaaaacggcggctgatgacaagggaagccgccgtttcctgagtttacccgtctatttgcaatgcgatatttccaaactgctccccgtctttcatccgtttaaaggccggaaccgcttctgataaaggaaatacttgatcgatcaccggcttaagggaatggcgttcgataaaatcaatcatttgccgaaattcttcgaggctgcccatcgaagtgccgatgatgctgatctgcgggaaaaagagcgagcgcagcggaagctggatactttctccagagctggcaccgaaaatgacgatccttccgttcggtttaatgacatcgaaataatttgcaaaagtggcgggaccgatgctgtcgagaattaaatcgacccgttccccatccaagctttccttccacaggccgcggctgtcaattgcgaagtccgccccatagcggagcgcttcttttcttttttcttcgcttcgggaggttacaatcacccgcgcgcccgcggcctttgccatgagcagcgcatttgtggcgacgcctccgccggctcccggtatgagaatgtgttcgcctttttctaaatgtcctttcgtaaataaagccctgtaagcggtcagagcggataaaggcaggacgcctgcttcctcccaggaaaggtgcgccggctttttcaacacgtgcttcgccgggacgatgacatgctctgcgaaagtcccgtcagaggggccgccgagaatgtccggcacttgcggaacggaatccgtatattcccagccgatgctcggattgatgatcacctctgtatgaacggcgaggtcccgaacgccttcacctgtctcttcgatcatacctgctccgtcggatccgggaataaacggggcatcgcctgcctttctggactgaaaaaggaacaagtcgcggtggttcagcccggctgctttcagcctgattttgacttcaccggggccgggcgttttgtcggaaacgtctgtatatttcagccctgaaaggcccttgattccttcatggatgatcgctttcataaaaaaattccccccattcgagttggttgtgttaaattatggacatgaatgaaggtaaatgtaaaatgatttgcccggggccgcttagaggccttctgttttataaaggattgcaatgaggcggaaattccattagtgtaatacagaagcaagctagcaagtgaaggagatggaacatgagttttcacgatcaaaatattttacctgcggtacgcaatatgaagcagttcgatacattcctggacagccctttttcatacggggtgctgcttgacatccatcttggacagctgggaggcgtgatcagcgcggcaagatcccatgggaaaaaaatgtttgttcacgtcgatctgatccaaggaattaagcatgatgaatacggtgcggaattcatttgccaggaaatgaaaccggcgggcattctttctacgagatcaagcgttatcgccaaagcaaagcagaagaaagtgtatgcgatccagcgcatgtttttaatagacacaagcgccatgaagaagagcattgaattggtgaaaaagcacagacccgactatatagaagtgcttcccggagtagtgccggaattgatcagggaagtcaaagaaataaccggcattccgatctttgcgggcgggtttatccgtaccgaaaaagacgtcgagcaggcgcttgcagcaggggcgtccgcagtcaccacctcagacactgatttatggaaaaaatactggaactaaaaatttaaaatgtgaaaaattattgacaacgctttcactatacgatacgatcttactaagttaatacattgtgacggagacccggagaccacagcagttctttactcagtatgatgtaaagaaagtttgctgtgtttttttatggtcttttagacacagtggagaaggtgaacttatggcgttcatctattagaataatacttcataatagattttaggagggatagccttgacagcattttggggggaagttatcggaacgatgctgctcatcgtctttggagctggagtttgtgcaggagttaatttgaaaaaatcgctgtcccatcaatccggatggattgtgatcgtcttcggctgggggcttggcgtggccatggcggtatatgccgtcggcggcatcagcggagcgcatttaaatccggccgttacattggggctggcatttgtcggagattttccttgggaagaagtgccttcatatattttgggacagatgatcggcgcatttttaggagcggtgctcgtttttcttcactacttgccgcactggaaagaaaccgaggatcaaggcgcgaagcttggagtattttcgacaggtccggcgattccaaatacatttgcaaacctgttcagtgaaacattggggacttttattctcgttctcggacttttaacgatcggtgcaaacaagtttactgacggactgaatcctcttgttgtcggatttctgatcgtggcgatcggtatctcgctcggcggaacaacaggctatgcgattaaccctgcccgcgatctggggccgagaattgcccattttgtccttccgattgcaggcaaagggagttcaaactggaagtacgcgtggatccctgttttaggaccggcgcttggcggttcatttgcaggcgttttttacaacgccgtattcaaagggcatatcacaaacacattttggattgtaagcgttatactagttgtgatattgttaggtttctatattcatatgaaaaaacaagcagttgatcaatcggtcaacatttaaaaaaaacgcaatcttaacagacatataagggggagtttcaaaatggaaaagtacattttgtctcttgatcaaggcaccacaagcacaagggcgattgttttcaacaaagcaggcgaaatcgtccatattgcgcaaaaggaattccggcaatattttccaaaccctggctgggttgaacacaatgcaaacgaaatctggggctctgttctgtcggtgatcgcttcagcgctttcagaatcggggatcgaagccggacaaattgccggaatcgggatcacaaaccagcgggaaacgaccgtggtttgggataaacataccggcaaaccggtctacaacgcgattgtgtggcagtcccgccaatcggctgagatatgccaggaattaaaagagaaaggctatgaagagacgatcagagaaaaaacagggcttttaatcgatccttatttttcaggcacgaaagtgaaatggatcctggatcatgtggaaggggcaagggagaaagccgaaaacggcgaccttctcttcggtacgatcgattcttggctgatctggaaaatgtccggcggaaaagcgcatgtgacagattattcaaacgcctcaagaacattgatgttcaacatctatgacctaaaatgggatgatgaacttctcgatattctcggcgtgccgaaatcgatgcttccggaagtcaagccttcatcgcatgtatacgctgaaacggtcgattatcatttcttcggcaaaaacattccgattgcaggtgcagccggcgaccagcaggcagcattgttcgggcaggcttgctttgaagaaggaatggttaagaacacgtatggaacaggctgctttatgctgatgaacaccggcgagaaagcgattaaatcagagcacggcctgctgacgacaatcgcttggggcatcgacggaaaggtggaatatgcgctggaaggcagcgtcttcgtcgcgggttccgctattcaatggctgcgtgatgggctgagaatgtttaaagacgccaaagaaagtgaaaaatacgctgtaagagcagaatctgccgatggtgtttatgtggtccctgcatttgtaggtttaggcacgccttattgggacagcgatgtccgcggcgctgtattcggactgacccggggtacgacgaaagagcattttatcagagcaacgcttgaagcgcttgcctatcaaacgaaagacgtgctggacgcaatgaaggaagactccgggatcccggttaaaacgctgagagtcgacggcggagctgtcaaaaacaacttcctgatggattttcagggcgacattttagatgtccctgtagaacgtcctgaaatcaatgaaacaacagcgcttggttcagcctatttagcgggccttgctgtcggcttctggagcgatcgttccgagatcaaagaccagtggcagcttgacaaacgttttgaaccgaaaatggaagaaaaagagcgtgagagcctgtacaacgggtggaagaaagctgtaaatgcagctagggcttttaaataagctgcatgtatgttacaatctaattaagttaatagaaacggttggagaagaggagagaccgcagacaccaaagcagtatcagcgctttggatgtttgtggtctctttttctattttttaccgtgacaacaagggaggacatgaaacatggaatcattattttcaagccgtaaacgggacgacattttacagaatatgacaaagcagaagtatgacgtgtttattatcggcggaggtattactggggcagggacggcattggatgccgcatcgcgcggaatgaaaacggcgctttgcgaaatgcaggactttgcagccggaacgtcaagccgttccacgaaacttgtacacggcgggcttcgctatttaaagcaatttgaagtgaaaatggtagccgaggtcggcaaagagcgggcgatcgtctatgaaaacgggccgcacgttacaacgcccgaatggatgctgcttccgatgcataagggagggactttcggcaaattcagcacttcaatcggactgagggtgtacgactttttggcaggcgtcaaaaaagctgagcggaggagcatgctgactgccgaagaaacgcttcaaaaagagccgctcgtgaaaaagaacggcctgaagggcggcggctattatgtcgaataccggacggatgatgccagattgacgatcgaagtcatgaaagaagccgttaaattcggagccgaggccgtcaattatgcaaaagtaagcgattttatatatgaaaacggcaaggtcaccggcgtggtcattgaagacgtcttcacgaaaaaaacgtaccgcgtctacgcgaaaaaaattgtcaatgccgcggggccgtgggtcgaccgtctgcgggaaaaagaccattcaaaagaaggcaaacaccttcagcatacaaaaggcgtgcatcttgtttttgatcaatcggtctttcctttaaaacaagccgtttattttgatacgcctgacggccgcatggtgttcgccattccgagagacggaaaggcatatgtcggcacaacagacaccgtctacaacgagaatttggaacaccctcgaatgacgacagcagacagggattatgtcatcaatgcaatcaactatatgttccctgaacttggaatcaaagccgaagatgtcgaatcaagctgggctggcctcagaccgctgattcatgaagaaggaaaagacccgtccgagatttcccgaaaagatgagatctggacttctgaatccggactgatcacgatcgccggcggaaagctgacaggctacagaaaaatggctgagcatatcgtcgatcttgtcagagaccgattaaaagaagagggcgacagagacttcgggccttgcagaacaaaaacgatgccgatttcaggcggccatatcggcggctccaaaaatctggaggcttttattcaagcgaaagcagccgaagggattgaggccggactgtccgaagagacggccaaacaaatcgccgcacgatacggttcgaacgcagaccgcctgtttgatcgtattccatcgctgaaagatgaagcagcaaaacgccgcatccctgtccatgtactagcagaaatggattacgggatcgaggaagaaatggcagccgtcccggcagacttcttcgtccgcagaaccggtgcgctgttctttgacatcaattgggtccgcacttacaaagagagccttacggactacatgagcgagaagctgaactgggatggcgaaacgaaggcccggcatgtcaaggcattggaaggactactacacgatgctgttgtcccgctggaaagcaaatgatttattaggtcaaataaccttggtgaattttcgttaataatcaatcgaatggcccggcgtgaggctgtcttgaacaggcagcctcatttttttcatttggcatgctaaatttggacaaagcggcggtttgtcgatatgataaaagaaaagctgcaattacttagctagaacattggaggtaatcatgagctggagaacgagctatgaacgctggagaaacaaagaaaacttagattccgaattaaaagcgcttcttttggaagcggaaggaaatgaaaaagaactagaggattgcttttataaaaaacttgagtttggtacagccggtatgcgcggtgagatcggaccgggcccgaaccgcatgaacgtttatacggttcgcaaagcatcggcgggccttgccgcatacataggagcgaacggcggcgaagcaaaaaagcgcggcgttgtgatcgcgtacgattcccgccacaaatcgcctgaatttgcaatggaagctgctaagacgctcgcagaaaacggcgttcaaacgtacgtgtttgacgaactgcgcccgacacctgaactttcctttgcggtaagagaactgaatgcgtttgcaggtattgtcatcacggcgagccataacccgcctgaatacaacggctataaagtgtacggagaggacggcgcgcagcttccgcctgctgatgccgacaaactcaccggctatgtcaatgcgatagaaaacgaactggaaatcgaagccggagatgaagctgctttaaccgaaaaagggctgattaaaataatcggcgaggaaatcgatcaagcgtatctcgataaactgacatcgatttctgtcaaccctgatctggcaaaggagaccgaagtcaaagtcatcttcaccccgcttcacggcacggcaaacaagtctgtcagacggggcctgaaagctctcgggtatgaacatgtcacagtcgtccccgaacaggagctccctgaccctgacttttcgaccgtatcttctccgaatccggaagagcacgccgcttttgaatatgcgatcagactaggagaagaaaatggagccgacattctgatcggaaccgatccagacgcagaccggctcggcgtcgctgtaaaggatcaagaaggccgctacgtagtgctgacaggaaatcaaaccggcgcgctgctcctgcattatctgctgtcgcaaaaacagcagaaaggcatgctgcctgataacggcgtcgttctgaaaacgattgtgacgagcgaaatggggcgcgacatcgccgcttctttcggactggacacgatcgacacgctgaccggctttaaattcatcggagaaaaaatcaaacaatttgaagcatcgggcgaatatgctttccaattcggttatgaggaaagctacggctacttgatcggcgacttcgcaagggacaaggatgccgtccaggccgcactgcttgccgttgaagtatgcgccttctataaaaagcagggaaaatcgctttatgacgggctcctcgaattgtataaatcgttcggcttctatagagaaggcttgaagtccctgaccttaaaaggaaaagagggagcggagcaaatcgcagccatcctcagcacattcagagaacagccgcctctttccatcgccggaaaagatgtcgtatccgccgaagactatttgacagggaagcggacgctgctaaaggaaaacaaaagggaaacgatcgaccttccgaaatccaatgttttgaaatatttccttgaagacggctcatggttctgcctccgtccatcaggaacagagcctaaagtgaaattttatttcgcggtcaaaggccgaaccaatgaagaaagcgaagcgcttctcaatcaattgacagacgaagtgatgaaaaaaatcgacgatattgtaaaagcgacctcaaattcgtaatcgctgaaaaccctcctttaaatggcgggtttttttattgtgaagagacgatgaatgatgtaatatatatttaacattaggtcatatataaattgcatattgaaaggagagaatgactgatatgaaatggatcaaaatcggggatgaatacatagaaaagaaaatgacgcaatttttcagcgaagccggtacgattgtcgctgccattttatgtttggatatgatcatccgcggctttattttaggaaaacctgcatccgaatacatcatcagtgccatcggttttgcggtctatgcaggctggattttgctccgctatcttttgtcgggatttgaatatccggagatcgcaggccaatcggcgtatcggaaaaaaagaaaagaaatcgcagccctcagcctcgcttccggcctcatatttgctattttaacgcttctctttaccggcataccagagcatcccggcagttgggttgactttattggtatggtgatgttgtttgcattccttcattttctgatcaactttatctcgttgcgcaattcctttcggaaaaatcaagatctattagatgattaaatcaaaacggcaggtgagcatatggttaaccgggtcaaactcgcccggatcgaaaagtctttgacacaagcccagctcgccgagcgggtcaatgtgacaaggcagacgatcgggctgatcgaaaaaaataaatacaatccgacattgcagctctgcatcgcgatcgcaaaggcattagacaaaacgcttgacgatttgttttgggaagaaaaagcctaaggatgagctttgccctttctcggtcaaaagtcttagaaaagatcatctcatgagggcgggcttttttttatcaactatcggtataatgaaagaaactccggtttaaggggatgaaacttttgcgggaagacacacagtttgaaaaactgaaaacgctcaaagaaatagcggaaactttaaacgaagggaacgatctaaaggaaacgctccatgccgttttaaagaagctgctccgcctaacgggactcaaaacggcatggctttttctgatcgatgaaaaggggagctttgaactggctgcttcggcccgcctgcctcaagccctttcttaccggcaaaaccgtttactatgcgaaggaagctgctactgtcttgaacaatacagggacgaaaagctggacagggcgaaaaatatcatccactgccggcggattacgacggccatgaaacagaagacaggagatccggaaggcatcacccatcatgcaaccgtcccgctcagtgaccaaaagaagcggttcggtttgttgaacgttgcggcaccgggcaaaattcatttcagccgcggggaactggcgctcctcgaagctgttgctctgcaaatcgggatggcgatcaaacggatgaggcttgctgaacaacagcaaaaacacctgctgctgaccgaaagaaacagattggctcaggacttgcatgattccgttaatcaaatgcttttttcgctcagcttgaccgctaaagcggcgggggaaatgacagaccagccggaaatcagggaaatgctcgagtttatgcaaaatctttctcatgaagcgcttcttgagatgcgggcgttaatttggcagctcaggccccaggggctggaagaagggttagcggcggctcttgaaaaatatgcggaagtgctcggccttcaagtaatcttcaagctcagcgatgtgctccgtctgcccccttctgttgaggaattgatgtggcggctgagccaggaagccctcaacaattgcaaaaagcatgccggtgcaagccgcatacaagtgaaaatcaatgtattccagtcgtctgccgtcttggaaatcgaagatgacggcaaagggtttcagtacgatcctaatgtggacattccgacgcttgggctgaaaggaatgaaggagcggacggaaaaagcgggcggcacgcttttgatcacctccgcaatcggtaaggggacaaaaatccgggcggttttgcctatgaaggagaagggggaggcaggatggagaaggtgaaaatcatcattgccgatgatcatcatattgtcagaaaagggctcttgtttttcttcaaaacaaaaagcgattttgatgttatcggagaggcttcgacaggtatcgaggcgctcgatgtcttgcgaaaacgtgaggcagacatcgtattaatggatttatcaatgcctgatatggacggcattgaggcgacaaagcgaataaaaaaggaatatccgtctgtcaaagtcatagcgctgacaagctatgcggacgagagctatgtgattcccgccatccaggcgggagcctgtgcctatcagctgaaagacgccgagcctgatgaacttgtcgagacgatccgcgcagtttatggcgggagatactcattggatccgaacatcatgtcccacgtctttcaccatgtgtcacaggcggatgagaaagaaaaaatacatcaattgacaaatagagaaaaagatgttttattggaaattacgaaagggaaaagcaataaagaaattgcagcatctttatttatcagcgaaaaaacggtaaaaacccatgtatccaatctgctttcaaagcttggcttatccgatcgcacgcaagccgcgctttttgcagtaaaacacggactacaacaaaatgacgggagaggatgaccaaatgaaaataaccgtaattagcggaactgcgagaaaacagggcagaacgcggatcgccgcttcctatatcgcccgcgcttatcaggctgagcttatcgatctaagcgagttcatccttccgattttcaacggagacgaagagcaaagctcgctggagaatgttcaaaaattgaaagcttcggtcaaagaagcagacgctgtcgttttattatctcccgaataccacagcggtatgagcggcgctttgaaaaatgcactcgattttttaagcaatgagcagttctcgggcaaaccggtggcgctttttgcttgtgcagggggcggcaaaggcgggatgaacgcgctcgccaatatgcgcattgtcgcacgcggagtttatgcgaacgtcatcacaaagcagcttgtgctcgatccgattcatattgatgaggagcaccaaacggttactgaagcagccaaagccaatattaaaaatgtaatggaagagcttctgctctttgccgaatttcaaaaagcctgacgccgacagagcgccaggcttattttattttacgtaaagacaagcacgccgttttcgtgttcatgtccggaaaatgaggcgtgatcaatatactgcagcagatcataaagccttttttcgacaatggcgtcatctctttcaaaattgtaggcgtgcaaaaaatgttcgatccgctttgataataaatcgtcttctgtccgcaccatcaggatcagcaggttgtcccactgcgaccggtgcgtatagtacaaagctttgtcataatcagcgtaattcaatttcgccactctcccttctttctgaggagtcatgcttattttatgtggcggggtgtttttttctccgggcaaaacttggtctcccttgtttggcggcctagaaatatgaggatggtatatgcagaccgcgaaaaatgtctgcatgacattcgccgtttacggtcaagctaacgtatgtacaatacatgcggagcgaatagaaatgaaaaaacgatattgcacgtactttttttgcatattaacacttttatcattcccggcgaaaggccactttcaaacagatgttttcgatgcacctgaacggtgggaaagaatcgcctggagcgcgcttgaagaaaaatacaaaggcgcaaagctcgaggattatgaatatttagggcgcacacaagtaaatgatgaagagacaaaggatgtcttcagggtaaccgtcaatcaagaaggcaaatcattttcggcgcacgccgaggtgtattttcatccggtgaccaatgcgatcatcaatgtcaatatttttcccttatagcaaaaaaaacgaaggaaaccgtttccttcgtcaactcaataatttacgtatatggtcctgattcatgataatatcttgcagagtgtattggtccaatacgtccaaataggcggaaagggctttgtttaaaacatgctttaatccgcagatcggagaaagtatacaatggtttttttctccgttaaaacactcgacaaggttaaaatcatcttctgtatgtcttatgacttcaccgatattaatcagttcaggcgcttttccgagacgaatcccgccgttgcggccgcggatcgtttcaacgtagccaagcttgccaagctcgtaaatcaccttcataaggtggttttttgaaatggaataagaatcggcgatgtctttaatattgacaagctcgtttgagtttttggttgctagaaaaatcagtaccctcaatgagtaatccgtataatttgttaatttcatcgcatgacctcaatcaaacaagtttccattatcttatcacatttgccttcgattatgagggtcgagcggaaattgttacaaaaatataaaacattcattgataatattgctttaattccattaaaagtctagtataaagatgtatctaaaatacatctttaatcaaaagtaacagtcctatttaaaaaagatcttattgcacctttaaagatgtatttcaaatacatttttaaagtgactggagaggagcaggcgttatgctatctgaaaaaaccatgcaaattgtcaaatcgaccgcccctgttttaaaagaaaagggaacagagatcaccacttgtttttacaagcggatgtttgatgcccaccctgaattgaaaaacattttcaacatgtcccgacagcaaaccggcggacagccgaaagctttggcttttactgtgctgcaggcggctgaaaacatcgaccggctcgaagacctgctgccggttgtcaagcagatcggacataaacacaaaagtttgcatgtgaaaccagagcactatcctattgtcggtcagcaccttttggaagcaattgaaatcgtgctcggcgaagctgcgacagaggacattctccaggcatgggcagaagcctatgaagagatcgcccgtgtatttattgaagtcgaaaaacaaatgtatgaggaagacaaaaagcaggatggaaattgggaagggtttaaaccgtttgtcatcatggataaacgagtcgaatccgatacgataacctccttttatttgaagcccgccgatggaacggctttgcccgctttcagccccggacagtacgtatctgtctgcattaaaattccgggcgaaccatatttcttaacaaggcagtacagcttgtcagatgcttggaataaagactactaccgcatttcagtcaaattggaagcggaggaaggccaaccggtgggaaaggtatcaagctatctgcatgagaacatggaaatcggcggcagcttggaagtgagcgctcccgccggagatttcacactttccgaaggaacggatcgtccggtttatttcattagcgccggatcaggcatcacgcctgtcatgagcatggtgcaaacgttggctcaaaaagaaagccgccgcgagatcacattcgtgcatgccgcgaaaactgaacggcatcacgctttcaaggaagaaacggagaagctgctcggcgccaatccggcgaaccgtctcctgttcgtctacagcagaggtgctgaagcgacggaagagcatactgtaaaaggccgggtgaatgaagagcttttgaaatcggtcgtgatagatccaaatggcgaattttatgtatgcggtccgctttcatttatgaaaagcgtgattgaaggattgcaaaaccttggcgtttcgatggaaaacatccgctatgagagctttgcttcatctcttgatatgcaaatagcgaactaacctcaagaaggcagctgtcaaaccgacagctgcctcagcgtgtcgacaaaccctcgcatacgttgtcagtcctgcgcgtcggtgctcacgaattccaacattcgctccgctccgatgctcggccttcctagactgcaagggttttcaatcacgctgaaagaaggatgacaaaatcccaaaactaagagctgttttgggattttgtcagcaatctaaggcagctgtcaatccgacagctgcctttcatcttttcaaaacccggctcatacaataaagagaagtccaaccgggggggatttgagtattgagcatacgggagcaaaaagagctgcagcgggcgattgaagaaattacggaaatcgcggaaggattcggccttgatttttacccgatgagatatgagatttgtcctgctgaaattatttatacattcggtgcatacgggatgccgacaagatacagccattggagtttcggaaagcaatttcacaaaatgaagcttcactatgactttggcttgagcaaaatatatgagcttgtcattaattcagatccgtgttatgcgtttttgctggacagcaattcattgattcaaaataagctgattgtcgcacacgtccttgctcattgtgatttctttaaaaataactgccgttttcaaaatacgaagcgcgatatggttgaaagcatgtcggcgacagcagagcggattaaacattatgaaacggtacacggttcaaaagaagtcgaagcatttctcgatgcggtgctggcgattgaagaacacattgacccttcgctcgtgaggccgaagctgtcgtggagcgtagatgatgaagaggaagaagaaaccggcgcgccggccactccttatgacgacctctgggaactggatcataaaggatcgaaagagaagaagaaaaggacgaaaaaaaagtttccgccgaaaccggaaaaagacattctgctgttcatagaagagcattcgcgggagctggagccttggcagcgcgatattttaacgatgatgagagaggaaatgctgtatttctggccgcagcttgaaacgaaaatcatgaatgaaggctgggcgtcctattggcatcagcgaatcatccgtgagcttgatctgacatcaagtgaagcgatcgaattcgccaagctgaacgcgggagtggttcagccgtccaaaacgggaatcaatccttattatctcggattgaaaatatttgaggacatagaggagcgctacaacaacccgacagaagacatgaaaaagatgggggtagagccgaactctgggagagaaaaaatatttgaagtcagggagatcgaatcagacatttcatttatcaggaactatttaacgaaggatcttgtgatgcgggaagacctctacttgtttcaaaaacagggaagggattataaaatcgtcgacaaggattgggaggctgtgcgcgatcagcttgtcagcatgagagtcaacggaggatttccttatttgacagttgaggacggagattacttaaagaacaatgaattatacatcaagcattggtatgaagggatcgaactcgatttgaagtatcttgaaaaagttctgccttacctccaccagctatggggaagaagcgtgcatgtcgagaccgtgctcgaagataaacccgtcatgttttcctatgatggaaaggctgtccaccgcagatatttataaaggctgcattttggcagccttttttcttttaaagcgcaacgatttcaactcgtccgtcctttcaaaagaaatgccaaattaatgcacgtttgcccagttttacgacttcattataaaaatgtaaaataaagtatttaatgatatttctaaaattgtaattttagctgccggaaagcgtaaaaatgtagtatttaagttacctttgaaatgtaaatgaaatattatctacccttaaaaactttttttgaaaacgaataattaaggaatttgacatagtaagtcaagactatacctgatggaattccctccttataatagaagcagaggaagggctgaagcagccgttctcaaaaaaatgaaactgctaattttcgcctttgaaaatataaaatattctgctattgggaggacaacatgaaaaaacaagtaataacagcagcatcagcggttgttttaggatcgactttgtttgcgggagccgcttccgcgcaaaccataacggtgaaaaaaggagacacgttatggggtttttcgaagaagtatggcacaactgtcagcaagattaaacaggaaaacaagctgaaatccgatatcatttacataggacagaggctgtcgatcaatggaagcagttcttcgtctgcaaaagcgtcgaaagtttcatcagctacgcataaagtggtcaaaggagacagcctttggaaaatttcgcggacatacggcatgactgttaacgaactgaaaactctgaacggtttaaaaacagatttaatccggattggacaagtattaaaagtcaaagggacgaaaagcgtaaaagcagcatcaacaaccaagccttccgcatcaagcgggacaagcaaaacaagcgcacctgcgcagaaatcttcaacgctgaatacgtcaaaacttgtttctgatgcaaaagcccttatcggaacgccttataaatggggcggaacatctacatcaggatttgactgcagcgggtttgtctggtacatcctcaacaaacagacaaatgtagcgagaacgaatacagtcggatactggaattcaatgaagagcgtatcaagcccggcagtaggcgatttcgtattcttcacgacatatcagccgggaccttcgcatatgggggtttacatcggaaacaatcaattcgttcatgccggttctgacggcgtaacgatcagcgatatgacaaacagctattggaagccccgctatcttggagcaaaacgcttctaatgttgcagggacaagcccgttcatcatgatgaacgggttttttccgtttagaaacggaactcggctaaaaacgccaaaaagtgctcgaccttctcattatctttcagactaatcgcatatccccctgcaacgggaagcttcatgaaatcgcacggcacctctattaatcttccttccatcagctcgcggcgcacagtcgacagcggcaaaaatgatataccgagtccttctgaaataaatcgtttcgtaatatgcgtctggcttacgagcatcgttctgacaaacggaaacttgatcctcagctgcctgacgaggtcgtcccagtattcagggtgattgtgggtcaacagcaaatattcttcaagcaaatcctcgacatcgagcggcggcgcttgttctgcagcgcggccgtcatgaggggcaaccaaaatcacgggatcgctgtacatggaatagcagttcaggtttgacgattgcacgtttaagcagcttagtccgatatctgcatggccagctgaaatcaggggagcgatttcagctgattcggcgatctttactttgatctccgaattcggatgcagcgctgtgtatttttttaatacaaatgggagaatcgtatcggcgataagcggcgaaaccgctaagttcaatgtctgtgagtagccttgtctgattctgtgaagctctgccatgctcgattcatagtcttccaacaggcgaagggcaaaaggaaggtaagcccgtccttctttcgttaaatgaatgcttcttcctttgcgggtgaacagctggcacccgagttcttcttcaagcagtttaatttggacggtgacggtcggctgagaaataaataaggtttccgccgtctttctgaaattttcgtattttgcggcagtgacaaaggtatgaagccatttaaaatccattgcagtcctcctgattaattttattaatcaaagacatcaatataattcaatattttttaaatattatatcaactataataatatttacaaaggaaaaaggaggaattgatatggtttatcatgggttaaaagggattacttgtgttgaaacagccatcagccgcattgacggtgaaaaaggaaagctgatctacagagggtacaatgctgatgaactggcgctttcgtccacatttgaagaagtcgcttacctgattctcaacggggcatttccgacggaagctgaactcagcagattcaatgagctgctcgcttcatttcgtgtgcttccagaagcatgcgagcgattgatccgcagtcttccggccgaattagacgatatggcggttctgcgcacggccgtctcttcattcggggacatatcgtttgcgttcaagccgacaatggagcaggccctcaggctgattgcggccgtcccgtcaattatcgcgttcagaaagaggctggctgatggagaagagcctgttcagccgctggatgagctaggttttgtggaaaattatttttacatgctgaaaggaaagcgtccgacagaagctcagaaaaaagcgcttgaaacgtacatgattcttgcgatggaacatggcatgaacgcttcaaccttttcggcaagggttacggtgtctacggaatccgatcttgtttctgccgtcacatctgcacttggcacgatgaaaggacctttgcacggcggagcgccgtctgcggtgacggatatgctggaaggcatcggggaaaaacagcacgctgaaagctatataagagaaaagcttgaaaaaggcgagagactgatgggatttggacaccgcgtctataaaacgcatgatccgagagcgaaggctttaagggtgaaagccgaggaaattgccgggggcgacagggatatcgaccttgctcttcatgttgaaaatacggcgatccgccttttggaagaatacaagccgggccgcaagctttatacgaatgtcgaattttacgcagccgctgtgatgaaggcgatcgattttgatgccgcattgttcacccctactttttcggcagcgagaatggtcggctggtgcgcccatgtgcttgagcaggctgacaacaacatgattttcaggccatcggctaaatatgtcggagaattggtctcacagtaatgcggacacacgccttctcatcgaagcgcgtgttttttaataggattttttgaatgtttagtagggaatcatgccggtgctcttgaatgtattcatcaagaaagtcctttaagggggagacgatgaaaaaaggattcctgatgttgatcatgctgttttttctaggtgcatgcacggaaggccgggattttgatgctgaatatgaagcgacaagcgcgaaagaaggcggaagcggcgccgaagtcatcgcagatcgcctggatgtgccttggacgatcgctcatactggcgagaccttttacattacggaaagaaacgggggaattgtgtccattgctgacggcaaaaaggagcgcatgcagcttcagctgaaaaagcccgttcatcaagaaggggagggcgggctgctcggatttgtactccatccggattttagaaacagtcaggaggcgtacgtttatcatacatacaaagacgggagccatctgaaaaaccggatcgtaaaattgacgcttgaccgcctcacttggacagaaacggatgaactgcttgccgatttgcctggaggcgcgattcataacggcggccggatggcgatcgggcccgatcaaaagctgtacatcacgacaggcgatgcaggggaaagggaatgggcccagcagcctgaaaagatggcgggtgtgattctaaggatggagcttgatggtacgataccggctgatcagccctttagctcgtcttatgtatacagtttcgggcaccggaatccgcaaggcctcgcatggatcggccgacagctttacagctccgaacacgggcagtctggacatgatgaagtaaataaaatagaacccggagccaattatggctggccggtgattgaagaaagcgatgagaagcagggaatgaaggcgccgctcatacattcgggagaaaaaacgcgggcgccatccggtttagcacagaaaggggacgtcctctatatggccgggctgcggggagagggtgttttccaggtcgatccggcggaagccaaagtagtcaagtggcttggcggatacggcagaatcagagatgtgaaagtgatcggcgatgatctgtatttcattacgaacaatggcgacggaagaggcgaaaaaaaacagacagacgatcggctcatccgcgtacctctgcctgacaagtaacctgtctcgcccgtttgcgtttaaggatgccggaatcgtggtaactgagcactaaacaatggtgaagaggtgagacaaatgaatccggcaaacagacagacagatggacagaaagcgcaaaaacaagaaaaacaacccggtgctgagcacaagatggtgccccttccgctctcggaagaccgcgactacaaaggaagcggcaaattaaaaggaaaaacagcgattattaccggaggagacagcggaatcggcagagcggccgccattgcatacgccaaagaaggtgccgacattgccgtcatgtacttggatgaacacaaggatgccgaggaaacgaaagagcgaatcgaacaggaaggagcagaatgcctcttgattcccggagatgtcggtgatgaggcgcattgcaaatcatctgtcgaaaaaacggtgaatcactttggcgggcttgacattctcgtgaacaatgctgcagaacagcatccgcaaaaagggatagaagatatttcgaccgaacagcttgaaagaacgtttagaacgaatattttctccatgttccatatgacaaaagccgcgctcccgcatttaggggaaggcagcgcgatcatcaataccgcatcgatcacggcgtatgaaggcagtccggcgctgattgactattcgagcacaaagggcgcgattgtcgcgtttacccgttcgatggctgcatcccttgtcaaaaaaggaatacgcgtcaacgctgtagcgccgggtcccatttggacgccgcttattccggctacttttccgccggaaaaaacggaaaaacacggcacagatacgccgatgggaaggcccggacagccttctgaacacgctgcagtgtatgttctgctcgcttcagacgactcctcttatatgacaggacagacgatccacatcaacggcggaagatatgtgacgacataatcccaaccggctgcttattgtaaggcagccggtttttttctgtttgttttttcggaaaaataagaatttgaaagaccactttcaaaaaagctgccccgtaagagataatagaaacagaaagagaaaggatgtgtatgaatgagcgaccgcagaatgacagcaaagtgggcatccaaacttggatttgttctcgccgccgcggggtccgccatcggtctgggagcgatttggaagtttccctatgtggcgggaacgagcgggggaggcgcatttttccttgtgtttgtcctatttacgatactgctgggataccccctgcttttgggggaatttgtattaggccgaaaaagccaatcggacgctatcggcacctatcaaaaaatagcgccagggacgccttgggtgatcacaggctggatcggaatcgccgcctgcttccttgtcctgtcgttttacagcgtgatcggcggctggattttgctttatatcattaaagcagtaaccggttcattgtcgggtctcacgcaggccggatacggggagctattcggttcgatcatccaagatccgctgcagacactggcagcgcagcttgcgtttatcatcatgacgatcctcgtcgtggcgaaaggtgtgcaaaaaggaatcgagcgcgtcagttcgattatgatgccgctattatttattttatttattgcgctcgttttaagggctctgacgcttgagaatgcgatcgacggcgtgcgttttctgcttgtgcccgattttggcagcctgacgccgcaggcgattctttttgcgctcggacaagctttctttacactgacgcttggcgtatctgtgatggtgacgtacagctcctatttgtcaaagtcacaaaaccttccgaagtcggcgctgtcgatcgtgatcatgaaccttgccgtcacgctgcttgccggcttggcgatttttccggccgtcttttcattcggccttcagccggatcaggggccgactttattatttgcggttctgccggcagtttttgaccggcttccattcgggatgctgttttttatcggatttttgacggcctttttattcgccgccttgacttcggctttttcgatgatcgagatcattgttgcggccattacaaaaggcgaccaaacgaaaaggggaaaatggacgtggacgatcggccttttgatttttgccgtcggcattccttcctgcttgtcttacgggatgcttgatgagccgttcatttttaagaagacgttttttgatgcggcggattatgtcgtcagcaatattttgatgccgcttggcgcgctctttatctccatttttattccgctgaaattgtccaaacacgatctatatgaagagatgaaaagcggatcaaaagcggggaaaggcttttttatcgtgtggttttatcttcttcgtttccttgttccgcttgcgattgtacttgtttttttaaatttaatcggagtgttttcattttaaaagatcaggagatgggtgaatatggtgttagactttcaacagatgtttccgagcgaggatggcaatcacgaggcgcggtatcagctgctggcattgcttgaagcggtattggccggaatggacaggctgaaggattccggccggctgacgcttggccgcgagtctgaagtttcatctgactactatcaaagcgtcattgaagaggccgtcttgccggaaaaaggcttcggggcggaaaaaagcgttgaagagctattgaaattgcttgacggccaccgctttttaaacaggcattatgtggccaacgcgacgcctctgccgaacaacgccagcatcgccgggaatcttttaatggttcttttaaacggaaacaatttatgggatgtcgacggcacggctgcagccaggacggaagtgcagatcacggcgatgctttctgatattgtcggctatgacaggcacaagagcggcggttttacaacctggggcgggcagggagccgtttttcagtcgctcaggctggcgatcgcaaacgcgtaccctgaagcgaatcagcaaggaacgccgcatcatctgtacgcgttctgttcagagctttcgcatttcagcctttataagtcgatggaagcttccggaatcgggacggaccatttgatcaaggtcaagacgaatcacgatcattcgatggatctggccgatttgcgggaaaaaatgcaagccgtgattgaaaaaggcggacatccgatttatgtattggcaacgcttggcacaaccgacgcatttggcatcgatgatttggccggaatcaagaacgtgactgaagaaatagaggccgcatacggtttgccgcctgtttatattcatgccgatacggcgatgggcgggatgtacagcttttttaacggatacgatttctccggcaatccgctgcatattgaagatgaggtgcttgagacgcttgcccgctacaaacaacattttcagcatttgcacctggcggacagcttggtctttgattttcataaactcggacaaacgccgtatatcacaagccttttcttggtgaaaaaccgcaaggcattgcaggctgttgatttggatccggatgagacgccttatgtcggcaacagagggtttggcagctatcatacgagctatacgctagagtgttcgcgaatgggaagcagcataccgatttatgcttctctgctcgcatttggaatcgaaggctaccaggagatcttggccaattacatcagggttaacctggcgtttcgaaaaaaactgctgcaggcttttccgaatgcagccgtcaccaatgatgtatcacctgtgacgacattccgcttctatccgggaaatgtccgctatcacgaagaaatcagcggcgccatcacggaggaagaagtgcggaatattaacaaatacaatgagaaaatcgccgaaacattgggaaggtaccgcagtcacacctatttcggcagcacgaaaaagcaaacatacgtttatcctgctgacagccgtttgccagtgccgctttatgtccagaaattctacagtgtctcgccttacacgacggttgatacaactgatcaatatatcgcctttttaaaagcgcatgttgaaacgtcggatgtagcggctggataaaataaagaacaggaggtttgaacctcccgttctttatttagttcttacatgccgttcttttttgaaccggtatccatatttcgcttttaaacgttggggagctgatatcttgatcctgattccagaggatttccggccctttcgtttgctcataatgtgaagacgggaaccattcagcataaatgcgcccccagacattttgaagggtgtccggaaacgggccggccgcttcaaagacagcccatgtcgaggccggaacttcaagctgttcatattggtccggacattctttcgttgtcgctgtaccgatataatggtcaagttctccctgctcttccatcctgccttcggagaagttcgctgatgcttgaatcagtccaagcggttccacatttgaaagctcctttaattcatcgatgttttcactgcttaaagttttccacatcgaggcgatatccggattgattccgtgaaagacgacagggactctttttttgattccgacgatccggaatgccttcttttctacaatacggtagttcatttcgtttcctcctctaattgttaactggaaggtcatcggaggatatgctttcagtgtgctgatatcgtgtctggcctctgtcggcgtaatgccgtgcagcttttgaaatgcgcgcgtaaaagcatccggcgagtgatagccgtatttcaccgcaatatcaatcacttttctttttgtgttcttcagttcaaacgctgcaagggtaagccgcctgcggcggatgtattcggacagcgaaaccccggcaagaaaagaaaacatccttttaaaatgatattcagagcagtaagaaagcttcgcaaccgtttgaaagtcgatactgtccgtcaggtgttcttcgatatacgccatggcttgattcatgttcttcagcaaatccatttgatgacctcctctgtttacaaatatagcaggagcagaatccccatatccgactttccgtgcccgattgtgcagggtcaatcttgagactgtccgccgttaaaccatgcagtcttcagctttttgatgccgtctgcgatgcttttttcagaaagtccgccaaacccgaggaggaccgcgtgtgtatcaggggggggcatatacgagactgaggctggatatactttaacccctttttccagcgctttttgggtcagccactcttcactcggggcgcttttcacctcaaggatgatgtgaagaccggcgttctctcctctgactgcggcatgaccgccaaattcacgcttgatggcatcaaggagcgtttttcgcttttttcggtagagtgttctcattcgattcaagtgcctttgataatccccgtttttcataaaaagagcaatggcatgctgtacatggcgggaaaccgtttgtttaaataaggatgccatgttaagcccttctttgacgagcggaaaggggagaaccatatagctgatcctgagggagggaatcagcgattttgaaaaagtccctaaatagatgacccggtcgttccggtcaagcccttgcagggaaggaatcggctgtcccgcatagcggaattccccgtcataatcgtcttcaatgatataagctccggtcgctgctgcccagtcaagcaactgcagcctgcggccgaccggcatgatcattccgagcggaaactggtgggacggagtggtgtatgcgagctgcggctgatattgttcaagatcctgcacggaaatcccgctttcgtcaaccggtattggaaccacattgaagccgccggttttcaggactgtttttgagcgatgaaatccgggattttcaaatccgacggttgtgcctttaggaaacagatggcacagcaactgcagcaaaaccggtgtgccggctccgatgatgatttgctcgggggaacagaccacgccgcgcgattctctgaggtaaaccgcaatcattttccgcagcggaatgtctccggccggggggccgctttgaaaaaggtcgtaccctgattcaccaacggttttggcgagcgtttttttccattgggaaacaggaaatgacgcgaggtctacatggccgtggtgaaaatcgatcatgtccgccgccgtctcatgttcttccagttctttttcggcaggaggaggaggcgcagtctgtgcaaagtcaccttccgcttcagccgcaaaccagccctttctaggcttgctgagcaaatatccttctgcagccagctgttcataagcgtgttcaacagttgtcaggctgacatttaaatgtttggcaagcattcgtttggagggaagctttgttccaggctttatatgtcccgaatgaatgccgcgtttgaaaaaagtgtacagctgctgataaagcggctcgctgccgctgcggtttaaaaagggggttatatccattcgatcagccctttcaattcatctggtatgttttattttatcaaaactggccattttaaaaaggtcagtttccgggttaaagtagtttcataatcaacagaagggaatgacgatgttgcttgattgtagggaattgcattctgaaacagagcttaaggaagtctatccaattatgagacagctccgcccccatttggatgaaacgtcttttgtggagctcgtcaaagaagcgcgggaggctgaaagctacacgttatttgcgctgtacgacggggatattccggtggctttggccggctttttgccgagggtctctttgaaccaaggccgtcatgtttgggtagcggatctcgtgacgtgtgaaaagcatcgttcaaaaggctttggaaagaagcttttaggcgctgttgaagagtgggccaaacggaacggattggcttcaatcgctttatcatcaggggtgcagcgcgctgacgctcaccgtttttacgaagataaaatggagtataaaaaagcgagctatctatttcgcaaggcgctgaaatgaaaaaatccccggtataaccgggggtttattaaaagccgagctgcagattcgtatcgatggagacgatggtccatacgcaaacgagaatgaaaatgttcaggacgacaccgagaaatccgagaccggtccgtccttttttgataaagagctcgataattccgagcggaacggcggccattgcaaaaggaagcatcttatacgaatatgcgatcgtgtcgcttaaaatggccaagtttaagacgaacagggacagaatggccgtcccgacagacacccatccaaatacgttgtgctccttaaagattcttaccagttccataattccacctcacctactttagctgctttgacaggcccttttttgatcagccgttcaacctcttttgacggtccggtaatgactgctccatacacgttcacaccgttcttttccacataggcaagccgtttggaaagcttcaggtctttcctgcctgaaatggtttcagcccatttattgtgcttgatcatataggaaagcgccgctttaaactgttcctcgccgttttcggcagggtgctgaatttcaaaaatccggtttgaatcttttccaggaaaaccgatcggctctgcgtatggatgatcttttaaatcgccctctgtctcgatcgcattccacagaacgcgaatgtcatagccttttaattgatcatacagctcctttgtcggatatgctctttcaaaggaaagaaaagcttcagttacggtgccgtcaggaagctgttttaaaatcgactcggctttggacactgatttttctttgatgccgtcagggtagacgaaatgccgttcttcatttgacagctcctggttgtattgatgaatctgcggagacttcagctgatcgaagaacatttccacgttttcatttccaactacttttgtgacgtttccgatttgcttctttaacgggaattgtgtttggattccaaagagttttactttgttgacaagtgcttcggtatcgacctgaatattcggttttgtgacggcaactgtcattgaagcggtttgcaccagttcatttcctttgctttcatgcccgcccaagccgtagtatagatagctgccgagtgtgcaaagcggcagaataataagcgttgaaattacggcaagtgtggaaatccgcatatatgatttattttttccgtatcttaaaatcgctttttgcttttcagggctgattgccaaatcccagtcttcgtctttcatttcctgttccagcatgtcctggtattcctcaagctgttcaagctcttcttcgacccggagcatttccgattcggaaagttcgccgtttttatatttttcccaacgttttttaaaatcttcattcatcgttaacacctctgttgtaaagtgctttcagccgctgtctggcacgaaataaaacacttttaaaattagcctctgagatattcatcaagcttgacgcttccttgtagttcaattcttttaaatagtacagcgtaagcgcttcccggtagttatcggggagctggttcatgtataaggttaacacttccttgatttcgacctggtgggcagggctttgcaccgcgttttgaaacaggcttccgatcatatcgtcagaaatcgtcacctcttttttatgctttctgacatagtcgataaacgcattgcgtgccacttgaaaaagccatggcttcaccttgctgtggtcgtaagaatggatgtgtatgtaagctctcataaaggtttcctgaagcaaatcctctgctagatgtttatctttcgtcatggagagcaggaacctgtaaacatcattcatatacatttggtaaatttcgtcgatagtcactgccttttctcccctctatgttataaacgcataagaaaggtttgaagttgcactaaatatgcccacggctcatttttcctccaatttcttacctttaaaaatcatctatcctatataataactgaacacgttcaaaaaaactaatcttcatgatgtaaagcggccgaaatataaaacacagcaacaaaataagcctttagcatatgaatctttattttatgctaaaaggcttatttttttgaggatatccttcatttaagaggtgcgggtaagctgttttgatcgtctgtcaaaagtaacggtcatgagcgcggtgtccttccgcggccagcgcatcggctttcgttcgatggacggtgccgaatggatggttgggcggagcatagatcgaataaagtttaagcggagtattgcctgtattggtgagattgtgccatgttccggcagggacgacgatagcggtgtcatcatatacatttcttctaaatggcaaatgatgtttgctcggccccatctgaacaattcccctgcctagttcaacacgaaggaactgatcgacgtgaggatgcatttccaatccgatgtcttcgcctgggttgaggctcatcagggtaacttgcaaatgccttcctgtccataaagcggtgcgaaacgttttgttctgctttgccgcttcattgatgttagaggcaaacggtttttgtccataatctcttaacacgatacgttcttcggtgccgggtgttcgaaaagcgcctgcataccctgatccgtgaaaccgtccggcgctgtaaggcgaaggaaggtgataaggaaattgatatggatgcatatgtttttaggtctcctcattagctttattaacatcaacgtatgcaataggcgtatggagcgtgcctagtctcaattttataggcttcatggtatcagatatacaaaaagaaggagagccatggaatacaccaacatatcggaacatcgctcgaaccgtcgcgcagcggtcatcggaacatcggccatcggaggctccaagggaggaagccgattcaaacgattcatgccgcgcttgatcaagagatcaacctggttaataccgctccggcatacggtttcggaacagatcgggccaaaattcacggctccgccgacaaaagaaaaagtcaggaaaccggggaggaaaattccccggtttttttgtgaaaaatcattttttagtaccaggtaataaaaaaaattgttataataataaagggaaacctcattcgactacatcaataaaggaagtgccatatgtatcaatttactggttatgctgcaaaagcgattctttctttgcgcggcggaattaaagtatacaataaagaaaatcttcctaaagacacaggtttcgttattgcctgcacacatgcaggatgggtggatgtcgtcgcactgggtgtcggcattttgcctatggaaattcattacatggcgaaaaaagagctttttgaaaataaattaagcggttcttttctttcaagcatcaacgcttttcccgtcgacagggaaaatcccgggccaagcagcatcaaaaccccgatcaagctgttgaaagaaggaaaaatcgtcggcattttcccaagcggaacgagatcatctgaagacgttccattgaaaagaggggctgtcacgatcgcccagatgggaaaagcgccgcttgtgccggctgcatacagcggcccttccaacggaaaagagcttttcaagagaggcaaaatgaaactgatcatcggcgaaccgctcaatcaggaagatttcgctcaatactcgtcaaaagaaaagctggtcaaaatgacggaggctttgaatgacagtattaaagctttggagaaaaagctggagcagctataattcaaacatacgcagggaaaaacagcttctcatgcacagagaggctgttttttttatttttctaaaattcaccttgcactccatttttatgataaaatagcagcgtttttattttttatgcagtatgttagaactatggttattggtggaggagctcatacatgaaatggtatttgaaagcaataaaaaactatgcaggatttacgggaagggcgaggcgaaaggaattttggctgttttgccttttctcatacatggttctggtcatctacggtttttttaaagccattctgcatcttccggaatatgaaatagagacatttttaggaatggtttatttgctcgccaaccttgtgccgggcttggccgtcacgatccgcagattgcatgatacagggaaaagcggattctggatctttatcggtttaattcctctcattggaaagatcattttgctcattatgctttgtcaagacagtgaaaaaggggaaaatcaatacgggccgaacccgaagacagcgctctaagcgaaaaccgcctgaggacaggcggtttttttaattgccgggtgcagttgctttttctaaaaacaaaagcagttcctgccaaaatgtttgagctgcaatggcatcgtattcagtttttccgccataggctatttttctgctttttcttccggatgtcggaaagtatggaggcctgatattatgaccggctttttcaaaatacagatgtttaacagaataagagaatctgttctttttcagccgttcttcgattttctcgttcattgaggcagagggccatactaaatcgtcagtgcttgaagttaacagtataggacctttaataagttccgctttaatgattgcaggatgatcatctttcacttttcgtaaagccttttggtaaagatcaagaaaagcatgaggctgtcttgtgagcttatgtttcatcatattccacagctgaggaagcgaaaacatcggcagcggtgcaaaggcgagcggtgcgccgttcaggctccaggaagatgtctgccggaatttttttaatccaaccccttgaaagacgactccgccgcctacatgagaaacgacaaagcggatttcaggaaaatgagaacctattaacagcgccagttcgccgccttttgaccgtccgcatattccgatctgacgatgatgaagtccttcctggcgaccgagccaatcgatcgctttttgaaagtattcaagcggaatttcaaccagttttttaggcagctgtttgtattgaaaataagggattgcaagtgttgcgtatccgtaatttgctaacatgcctgccattgtttcgtcaaggccgccgtcagatccccctaatataatgattgcgggagggcggttaacggcaagcgggcgaaaaaaagtgccgcacaacccatcttcgtttacttccagtctatcaactgtttcagaaagcagcactcgttttatttctttactcaagatgatgcgttctttttgcttcacttcaatacggtaaacggacggatgaaccgattttttgtaaaatgagcaggaagattcaacagcctgcattgaccaaaaaagccccatttgatctttagactgataggttccttttagtggggctgctgatgcaggggcgacttctcctaatctattcgcttgaaaaacagcgtgtgatctccactctgcgtcagcttcatctttcactgtaacgatgatatcaatgatgtcaaacggttgaagtccgcttatcttcaagtttattttttcatcccatttggaaactgcaggtatgtgcaaaaccggttgcaaggtaatcaagacggcacttccttttcaagttttgtgtaaaataaatcgacgcactcttcaacatagtcatcaatccgatcattgaaagactccttgaatccgggcaaatgttgaaacataatatattgattcagtaaaccgaaaaacatttggcttaacatttgaaagttgccgtctgaaatttttttttcggcgtagagctttgcaaaataagcctctaaaaagcggttgagacggcggggaatatccatgattaattcgcaaacttctttatcagatacggcgtcattaaagtaaagtaaaaaaacagtccctttttccaggttttcttttaaatacgcttttgctatcaatgagaggtcttctcgtaaatcgccggtcagtattgctttaagttctccaataaaatctccggatgcaacatgttgaataacactttcccgaaataaattctgtttatttccgaagtgtctaaaaagggttaaatgattgactcctgccttttgggcaatttctctggtggatgcggctgtatatcctttttctttaaaaagggcaagcgccgcttggattaatcgatcccttgtagattgtgttgacataagtccctcctaaaatgtaaccgattgattacatcataattgaactttgccatgtaatcaagtggttacatattttaaatgcgaaaaaaagaggatacaattcattgtatcctccggtgtgttcacaatgttattccgcttcctcgagcagcgtttccgcagctttcttcacctctacgtatgaaacgtggtggccgtcgatttcgctgatcgtgaattcaaatccctgctcggtgatcatgtcgcctttttggacgtcatatttttgcgtcaggaaccatccgccgatcgtgtcaatctcctcattgtcgagctgaatgccgagcaaatcgttgacctggttgacgagcactttgccgtcgagaatgtagtggttttcgccgattttgcggatttcattaatttcatcaatatcgaattcgtcgcggatttcgccgacgatttcttcaatgatgtcttcgaccgtcacgagtccggccgttccgccgtattcatcagaaaggatcgccatatgaacgcgctctttctgcattttcagaagcagatcgtggatcggaacggtttcgatcacatgaatgatcggattgataaactgttcaatcgtgtcttctttggagcattctccgctgatgcaggccgtcagtatttccttgacattgatgacgccgacgatgttgtccttatcaccgtcttcgacgggatagcgggtatagccttcggccttcgtgatgtcaatcatctcggcgattttcatatcatttggaaaactgacgacttctgttctcgggatcatgatttccttggcaagacggtcatcgaattcaaaaattttgttgacatatttgaactcagattgattgatttcgccgcttttgtagctttctgacagaataattcgcagctcttcctctgagtgcgccatttcattttcagaaaccgcttcaaggccaaacgctttcgtcaacagccttgctgatccgttcagcgcccagatgaatgggaacataatgcggtagaaccagatcaacggttttgcaaaaagaaaggaaacggcttccgctttttggattgcaagcgtcttcggagcgagctcgccgacaaccacatgcaaaaacgtaatcaagctgaaggcgatcacgactgaaacgatgtgtgatacagagctcggaatgctccatttaacaaatagcggttcaagcagccgggcgaccgtcggctccccgagccatccgagaccgagagccgtcaaagtgatgccgagctggcaggccgataaatattcgtctaagtgcgtaatgacttttttcaccgaaatcgctgttttgtttccttcagcaatgagctgatcaacccgcgagcttctgattctgataatcgcaaactcagacgctacgaaaaatgctgttaaagcaattaatacagcaacaaaaatcaaattaactatttccaattaggaccttcactctagcgtgagaatgaaggtaacacctcctgtttagtaaaagattaactaaagcagcagcaaaaatgactggatgaccgtcattttttcaggagaaagacggcttttcagaatcttccgttcatcgggattcagccgtttcaatctgtttatgatcacggagatattgtcattgacatgatcgatttccgttgtcaggcttccaatttcatcatcattcacagttgaagagggaaactggttttccagcctttctttaatgtcggacagggccaatctctgctgcttgcagtccataataaacttcagccgtttgagagcggcttcatcgtaataacggtagtttgaacatgatctgtcaggcgttaacagcccgagattcgtataataatcgacagtccgttttgttacgcctgcagcagctgctaattcgccaatgcgatatttctctgccccatctgcatccctcctcaaccatcacgttatagttataaaacattttaatatattagaagctgtttatacaagttaattgatcaaaaaaaggcgtaaaattgatgcgaaaacctttatttatctaaatattcgagaaaatattgttagatttaaagtttagacatttgactgactcttttttaataaagtaagataatagtatatatttggcttggaggtggttagatggggccctctgcatagtcatttttacagaacgcacatcagccttattaagggaatttgaattcatcaggaggtgactccttgtcctttgtgaaggataaggttaaatggacgatattgttagtctgataatcatcgggattctgattgcattaaccgcttttttcgtggcatcggaatttgcgattgtcagagtcagaagctcccgcattgatcagctgattgctgaaggaaacaaaaaggcggttcgcgcaaaacaagtggtgtcggatttggatgaatacctttcagcttgccagctcggcattacgattacagcactcggactcggctggatgggggagcctacggttaaaaaggtgctgcatccggtctttgaaagcttgcatgtttctggcgctgtatcgcacgctctttcagttgccattgcatttttagtgattacattcctgaacgtcgtggttggagaacttgccccaaaaaccatcgcgattcaaaaagccgaacagatgacactgtggctggcgggacctctgcactttttcaatgttgtgatgttcccgttcatttggacgctgaatgcctcagccagagtgctgaccgggttattcggtttgaagcctgcttcggaaaaggatgaatcccattcggaggaagagctgcgaatcctgttatcagaaagctacaaaagcggagaaatcaatccgtctgaatatagatacgttaataaaatctttgaattcgacaatcggatcgccaaagaaattatggtgccgcgcactgaaatcgcctccgtcccggtggatatgccgatcgatgaggccatttcggtcatgctgcaggaaaagtatacgcgctggcctgtctataaaggcgataaggatcatgtcatcggcatgatcaatacgaaacagctgtttacggatatgctcatgatgtcagaggctgagaaaaagcgattgtcccttgaagcctatgtccgtccggttattgaagtcattgaaaccgtgcctgttcaaaagctgctgatcaaaatgcagcgggagcggattcacatggcgatcttaacggatgagtacggcgggacatctggtcttgtgacggccgaggatattcttgaagaaatcgtcggggaaatcagggacgaattcgatgaagacgaaaaaccgcttatcgaaaaagtctccgatcatgaatacatcatggacggcaaagtgagaatcgatcaggtcaatgagctgtttgaagacgatctcgaggaagaggaagtcgaaacagtcggcggacttgtgctgaaagaaaacatagatatcgcggaaggccaggcggtgcatatcggctcttacacgataacggttctcgaaatggaagggcgtctgattaagcacgtcgaagttaagcgggaacaaacaacagaacatgtagagctggcaccggcaaatccggtcgtcgttaacgaagtcaccttgagcgaaaaatagctcaaggtgatttttgattttaagaaaaaagtcatttgaacaggaacttttgttcgtatataatgggaacaaacgttctgtttgagaggtgattgatttgctgtggtacgaaatcatttcggaggaagagaggaaaacgtatattaagcggatcgaatttcatttgcggaattggaaaaattacaaagccgccgtgctcaatttagaaaggaggatggagaaggagcaaaagaacgggctcaccgtcaaagaaagaaacgctgaatatcagatcgacgcggaaaaaaggctctatcaatttttgcttgattcgatggaaacggctgtctcagaattggatgagctcgagcggaagttggtggaatgccggtatattcataattggagcatgggaaaatgcgcgatggaaatcggctacagcgaaaaaacgctgtttttaatgaagaaatcgctgctggacaagctgcttgtcagcttggcggcgatcacgaatatttaacggatgcgagggcttgtctcaaacaagcccttcttttctggccgcttcagttttttttcaggttcttgacgcgatgatgacacgggagagggcagcttttcttttatgataaagacaagctttaaacagcggggaggtttgacacatgtaatgaaacaaatgccggtcattttttgagacaaacgcttcaggaaaggagaggaagaacatggatttttctgaaattgcgctcgttccgctgattacgggattggtgcatacggtaaagcttgtcggcattcagaaacgatttctccccatctgtgcaattgtcttcggcatctcgatttctctcttgtttaccgcaggggactggaaggaagatatgatgatcggaacttggcttggattgtcatcagttggattttactccggttcaaaaaacgtcttgaaaccattatcaaaggaggagattgaacatgaagatttatttggatccgggacacggcggaagtgatccgggagcatcgggaaacggtttgctggaaaaggacgtgacgcttgccattgctctcaaaatgaatgacattttattaaaagagtatgataacgcagagacgaggctgagcagaacgacagacaaaacggttacgcttcaggagcgcacagacgatgcgaattcgtggggggccgatttgtttgtctccattcatacaaacgcttttgacggcacggcgtacgggtatgaggattacatctacagcggcctgtccgatgaatcagttaccgctctttatcaacggatcattcacggcgaagtaatcaagcagaacggactcagggacaggggaatgaaaaaggcgaactttcatgttcttcgggaaacagcgatgcacgccgttttaacggagaacggctttatcgatcaccccgaagattcggcaaaaatgaaaagcgccgcctggatcgaacagactgcgcggggacatgcaaatggcatcgcgctctgcctcggcctgacgcagcgcgaattccccttgtataaagtgacgatggacggggggcaaatcggggcttaccaagaaaaagacgacgttttgaaagttatttctgcgaattgggacagctttcaaaaagcggctattgaaaaagggtagaaagggaagaatccattttgaatcattcaaaatggattcttgacatttaatgagtccgcatcttttttcatttgggcgtaatgttcctttctgaacgctcccatcagaatttgagctgctatacaaatcaataaaccagaataattggttcatcataacaccatcattttcacggaatcagcatgctgccggcccagaatccgccgattgagcctgccattgtaagcaggatgtaaaccgctgaagcctttacccgctttgcagccaaaagctgaacagcttcaacgctgaacgtcgaaaatgttgtgaagcctccgaaaaatccagttccgaccacgatagagaccgtttgattgtcaatgccgaggcttatgaatatgccgagagcgaatgagccgagaatattgatcaccatcacgctgaccggaatgcgggggcgcggaatcatcgccatgagcacattgcccagccaaaatctcaaaacggacccgattcctcccgcgatcataaaagcagctgccatcatgattgataccgctccttttctttccccgcagctccgctgacctttttgccgatcacgatccccaaaaatgcgaagcataccccgcaggcaagcgatgccatcaagtacagaactccgatgtgagcggccgattgcagcagaagtacggtttctttagaaaaagcggacattgtcgtatacccgccgcaaaaccccgtccctaagcataattggacgagcggcttttttgcccgagccgcaaaaaagcctgtcaaaaggccgagcagaaggcttccggacgtgttttcaataaaagtcggccaaggaaaaacggcggtgccgccgagcagattgactgcgtagcgcagcagcgatccgatggctcccccgataaaaacggcaacatatgatttcatactcttccttctttctcaaaaataatccgggtagtcggtaatgatcccatcgattttccagcttttgaggcggcttcccgttttctgcccgttgaccgtccaagccagcgccttcaaatcacagctgtgaatcgatttgatcagaaaagggctgatcatcgtagctttcaggctgacgtattgggcaaacgaagcgatttgccgcagccggccgcgcggcagcaatccaaatctcggcctgatcaaaacggcagtctgaatcgaaggatacatgtgatgaaacgccctcatggcgccggcgtcaaacgactggacaattgtgttcattgaacggccataccggctgatcagttgtccggccgctttttcgattccgggctgggttttggacgacttgatttcgatgagaaggcccgtcttattgtgatacttcctcagaacagcttcaagtgaagggattttttcgccttgatattcagggccgaaccagcttcctgcatccagctgttcgagctcattcatcgtatactcgcgaacgaaaccggtaccgttcgtcgttctgtcaaccttgtcatcgtggatgacggcaagttttccatcctttgtaatctgtatgtcgagttcgataaaatcagccccgagctccaccgctttttcaaaagcggcaaacgtattttctggggcgtaagccgaggctccgcgatgtgcgataatatgcaaacatgtcagctcctcttgataaaatctttccatcacaaggatacccgattttggcgatgcaagtaaatcctttgactaaagcggacaaaaggcagggggaagagatgtgcgacaaatttcggcaaaatggtacaaaagtatcatttactaaaaattctgatattttataatggacaaaaggaggcgagatgatgggtaaagggagaattaaagtggaagaacggattaagatcgaaaccgatgctgaaatgtttaaagcgactctccttgatcaaacacagtctcagaagaagaaatagcggtgttggcccgtatcacgttgtctctgggaacaataaaatagaatgatcatcaggctgccgaaggtgttcggcggccttttatgcgtggcatcggtatttttggcgtacaataaagtgagaaattttttgctcgttttagtataataaaagcttgatgagtgaaataagggagagaaagcaatgttcgaaaagtatatgacaatggatttcgctgccgatatcgggatcagcatcggtatccttcttttatttttcgcgtttagaaaaatatttacgaagtacttattcaacctgatactgaaattgacgaataagacgaaaacggactttttcaatcaggtggtgctggcgtttgaaaagccggccaggtggttttttgcgatactcggtatttatctggcgattatttattccccgttttttgaggggcatatggggatcgttcataaactgtacagagtgtccgtgattttggtcattgtaagcggcctgtataacttaacggcggcttcgtctgttttattcgataaaatcaataagcggcttgagcttgatatggatgatattcttgcgccgtttttgtccaagattctccgatttatcattgtagcgcttggaatcagcgtcatcgccggagagttcaattatgatgtcaacggatttgttgccggactcgggctcggcggattcgcttttgcccttgcggcaaaagacacagtcggaaactttttcggcggagttgtcattattatggagaagccttttacaatcggcgattggattgaaacgaaaattgtcacaggaactgttgaagatatatcgttcagaagcacgaaagtccgcacggccggagaggctctcgttaccgttcccaactctgtgctggccaacgaagcgatcatgaactggacgaaaatgcgaaagcgtcaggtcacctttacgctcgaaatcgatccgtcaaccccgcgggagaaagtcgagcggtgtgtggagcgttttaaagaaatgctcgaatcgcacgaaggggtcaacccggatgtcattatggtcaatttcgatgtcctgaaggatacgcatttaagcatcttcttcaactactatacaaatacgacggtctgggccgaaaacttggacgtcagacaggatgtgaactaccgcattcttgacattatgaaagaggagcaggttgattttgtttctccggggcacagcctctttgagttgaagaaaatgaaagatcagcaaggaaatgcttagaaacagtttttgaagggagacaagccaaatggaggaagaagccctgagatttgcggatatgatcgaaaatgccgagcgcattaccgttttgacaggcgccggtatgagcacggaatcaggcattcctgattttcgttcagccggcggcatatggacggaagatctgtcgagaatggaagcgatgagccgtgattattacgaacgatatccaaaattgttttggccgaagtttaaagagctttttcaaatgaaaatgacgggaacttatcggccgaatgacgggcacctttatttagccgaactcgagaaaagcggtaaggatgtcagggtgttcacgcagaatatcgacgggctgcatcttaaggcgggaagccgccatgtatatgaactgcacggttcgattcaaacagccgcttgcccaaaatgcggggcgcgctacggtcttgaccacattcttcaagaagaagtgccaaggtgcaatcgcgtcaatggcaaggggagagcatgcggatttatattaaaaacggatgtcgtgctgttcggcgacgccgttcagcatttcgacacgctttttgaagtcctcaacgaatccgacctgcttctggtgatcggcacttcactcgaagtggcgcctgtcaggtttgttcctgaagaagcgcacctgatccccggtttgaagaaagccatgatcaatctcgatgaaacgccttacgatcatttattcgacattgtcatcaatcaaaaaatcgccgagtttgttcggaaactcaatcattaaaaaggaagacgctccagaccggagcgtcttttttgatcttcatcacagttttttataataaaaaacggatgcatcgagccggccgtctgcagattccgcgtattcaggaatgcgtccggcttcggcaaagccgagcgaagcgtaaaggaggttggaggggtctttttcccttgtatccagcacgagaagagatctgccttcctgtttcgccctgtcgatcgctttttgcattaacgatttggcgacgccctgccgcctgaaggcgggatctgtcattaacttgcagatttccgctctgtggcggccgttttgttttgtgcataagtgcaattgaacacttcctgcgatccggccattttgtttggcaatccataaaaccgaatccggtgcgacggctgttttccagtaagcctccgccagccgcttttcgagcggaggcagaaagccgactgatgccccgtcatcgacgacgcggatgagaagctcggccaattgattggcatattccgcggttgaatgcaactcttcgattttcatttacccaccccatggtataaagataactgcatcataatcagaaaactgtttttttggcaacaagtgtgtcagataatcacactcgagggaggaaataaaaaaatccccttcatcaggggatcagacaatggatgttattcatgaacgggtgtcatggattcatcaagtgttgcaaatgaataccccatgttttttaaatttgtcagcaataacggcaatgattgaaccgttgaaggaatatcgtgcatcaggatcacgatcggctgttttgtctgccgcttttccaggatattcagctggttcatgacttccggaacgaatttttggcttctgtatttccagtccaggctgtcaatattccagtcccaataaataaatccgttctttttcagcacttttttctgcgcttcggtcagcgacggtttgcttccgtacggcgttctgatcaaatgggtttcaaccccggtgatagacttcagcgttttttgagcctgcttcatttccagattaggagaattggcgcctttataaaattgcttttggtcatgggtcaccccgtgaagtccaagtgcatggccctgctgcttcatattgagaacggcttctttgtgaagcttcatgttcggttcgagcatgaagaatgtcgctttagcatcatgttcggataaaatttgcagcagcctttggcttacggctgaaggcccatcgtcaaacgtcaaataaaccgttttttccttcgatttttctttctttttttccgcagcagctttttgcttctctttttcctgcttgcgcttttcgatctgctgttttgtgctcaagtgatcgagaagttcgccttgcgttgcttttttgagcggaacgctgtctccttcatgcctcatttggctgttttccgacaccgtaagctctcttttctcagtagcggcagaggactgtgaaaggtcccacacgtacaggagaatcagacacaacacgaaaaagcacgctgctttcgtcaacaaataagctacagatggggcagttttttttgatacttggcgcatgtcactctctccgtatcatttttctcgttccgattccattatgagatagaatgctagtctcataaaataatggatcacaatgtctaagtatacaggattggaaagaagatgaatacaggatgaagggaaaaatatatcaaattttaagagaaaatgttgaacgataaggaatgctgcttttttgatcctgaaggcggaaaaaagtttttggaaatattgcactattttgatcggcagggtcgtgttagaatggaatggagaaaattcagaagtcaacaaaaataaggggatggagaaatgaaagttctttttaacggccggctgattgaacggagcgagtgtgcggttgatattgaggacagaggctaccaatttggagacggcgtctatgaagtcatccgcatttacaatggaattttgttcacgcttgatgaacacattgcccgcttatataaaagcgcagccgaaatcggaatcgacctgtctttttcagaagccgagctgaaaagccagctgaaagagctcgtcgacatcaatcagatgcgggaaggcgggctgtatcttcaagtgacaaggggaaaagctccgaggaagcatcaatacggagcagggcttacgcctcaggtgacggcttatacatttcctattcagaagcctgaaaaagaacagcaaaacggcgtttcggctattactgcggacgacatgcgctggctgaggtgcgacattaaaagcttaaatctgttgtacaacgtcatgatcaagcaaaaagcgcatgaagcttcttcattcgaagcgatcttaattcgcgacggtttggtgacggaagggacgtcttcaaatgtttatgtcgtcaaacaaaacgctatctacacccatcctgcgacaacgctcatcttaaacggcatcacgcggatgaaagttcttcagctgtgtgaagagaacggcttgaattatgtagaaaaagcggtgacaaaggatgaattgctgaatgcggatgaagtattcatcacgtcaacgacagccgaagtcattccggtcacctcgattgacgggcaaacaatcggctccggagcgcccggaccgctcacaaaaaatgtgcagaccgctttgcaaaacagcattttgtcggaaacagccaaaacggtttaacaaagaaaaacgccgtctcctggggaaacggcgtttttttatttgcggaaaccgaacaaaatcgaaaagagcggcgataaataaaggaaaaacacaaacggcaaatattcaatgacgggaacgccgagcgctgtggacatgaacgcgccgctgactccccatgggatcatcggattaattaatgtccctccgtcttcaagtgatctcgacaaatgcttccggtcgattccaagcttgtcatacagctttttaaaggactgaccgggaatcaagatcgataaatactgttctcctgtcgccaggttcatgccgatgcttgatgaaacggttgagaacacaagccggcctttcgtatgaatgcccttgattacgccttcaagcaggcttgtaatcatgccgatcttttccatgagaccgccgagcgcgaatgcgatgatgatgagagaaacagagcccatcatcgattgaaggccgccgcgatttaaaatcttttcaacggcttcagtatcggctgagaaaaccgggccattctgcatcgctgacaaaaacgatgaaatgccggcgtcaggctgaatcagcgcggcaaaaattccggcggaaacgatccctgctgcaagcgacggaatgacgggcgtccgtctgacagcaagtacaatcacaagcagaggcgacagaagcgtgaagacgctgatgttgaccatgccttctattccgtttatgatcgcttgaatgttttcggttgaagccggtgccgccgttaaagaacggcccatgaaaaagaaaagcaaaatcgtgatcaaaagagcggggatcgtcgttcccgccatatgtctgatatgcttgaaaatcggaagctccccgactcctgcggcaaagttggtcgtgtctgacattggagacattttgtcgccgaagcaggcgccgcaaatcacggctcccgccgcccatgtcagtggaacgcctgccgccgcggccacaccgatgagggcgacgccgatcgtgctgaccgtcgtaaagctggagccgaccaatgaactgatcacaagacagctgaaaagtgcggtgagcagcaggtgctgcggttcaatcagattcaacgcgtaaaccgttaccgtcggaatcgcgccgctgtactcccagactccgattaagatgccgattaggcaaaggatgatgatcggctgaacgccatttcggatgcctgagacaatgccgctctcaagatctttccaagaatgccctttcaccgcgccgacagcggccaaaaaaccgacgcaaatcaaaagcggtatgtgcggttctgctttaaatatgaataagcaggtgaaaataataaacaatatggccataaacaatagagccgatatggaaaacgatagtcgtttttcgtttgacaaatcatacacctcattagaagaaatctctttctttaatacttttatgcttttgtgcgtaaacgtattataacagaaaaatagatcatatacttaaattaaaatatttcaaacatttttcaaaggttcgcccattctattttgaaagcgctgacttttttaagatataatagattggagaaaggcatgtatttgatacacgtttcaatatccttaagccaaaatagggggaaatgcgatgtcttgcactgttcagaaaagccggtttttacatgaggaagcgatacggtttgaaaatgatgatttagaggcagtacttgtgcccgggtggggaagcaatttgatttcattgaggtggaaggcgggcggtttgaatttgttgaaaacgcctgaaacaaaggaagaatatgacgcgaatccgtttttattcggaatccctgttctttttcctcccaaccggatcgatcacgggagatttacatatgcgggaagaacatacgagctgccgatcaatgaaaagccgctcgaaaaccacctgcacggatttctttacgataaaaagtggacggtaaaaaaaatggaggcaacagaagagcggatcatcgtgcagacgatgctggactctgatgatcatccgggcatcaaatcgatcttccctcactctttttccatcaccatcacctacacattagaaggacagcatctgaaaattgatgcgtcggctgtcaaccgcggtcaagatccgatgccgatcggattggggtatcacacatctttccgctatcctttaaacgaatcaggggataaagaaaagtgcctgtttactcttcctgcctcaaagcattggacgctgacagaccgcatgctgccgactggcgagtatcgggtgacagaggagttcaaagcgggaaaaatggcagcgggtgaaaggcttgatgatatattggcggctgagcaagaccaagaaggaaacagcaccgccgtcattgcggacagcctcgccggcattcgcgtacgctatcaatgcgacggccattttaagcactgggttgtgtttaacggtacatctgatcaggatgatctgctttgtattgagccatacacttggatgacgaatgcaccgaacgtgaaccttccgaagagtgtgaccggatttcgggatttggggccgcaggaagagctgacgatgcgaagcaaaattgaggtaggcggaatataatcgatattccgccttttaccatgagcttttatcaagcgtaaatcctgtatgggacgcttgtttgccctctctccaatccaattgaaccgtcacctcgcggccggcgatttcagcttcttcaagcccttccaaaaaagaaacggattgttcttttgaccctccgccggggaatttgcctcccgcgtaatctttcaccggcgtttcgatttgggcgttcaaaacgatttcatcaccaaactttacgaccaatttttccaaatatgtatcgtccagcttgccgcggtcgcctgtccagtagagctctccgccgaacagcgcgcggccatctatctttttgatcacggcctcccaatttccgtcggcgctttgcccgttccattttgggtattccgccatataaaaaccgatcagcctcccgccgaaataaacggcgcaaaaggccatgaaaagggaggcgatgaaaagcaccggccgcttgtattcctgtttcatattaaccaccgcctaaaaagttctgctttaatcataaagcagaacaatcggaaaaaatatattctcttaaattttaagggaacgggtgcgggtgcaggttcagctgttctggtcttaacggctcttccgcaaagccgagcttcttcggcacggtgaaaattctctcaagcccttccaggcggatgaagcgctgtccgaatgtcatcggaatcaggcccgggatgagaactttcacacaataaagtccattccgtttgataacaggggaagtctgatcaacgacgatcacttcaaggttgagactccggaaagcttcaagcaggtcgcagaggtcttcggttaaatcaaggtgtttctttctttttttaaaggcatcgtcgaatgtttgcagaggccggctttgattcagcaaaaaactgagccgctcttccgcttcgggcagtccgtacattaagctgtgatcctccatttcccgcactaaagcaggactgcggagcatctggtgatatttgctcctttcagattcaaatttgcggtcgtgcttcaacatcatgcctgccagctcatgaagggcgcttttcaccgcttttacgggatcggggtgggcgcctgcggaacaaatcagattcaatccttcccgttttctgtttttggcgatcgcccaaatgcttggaatgccgtattccatcgttgaattaaagacatgcagatcatatcccgccacacttcgcaccctctctgtcatgaggcgcaattccggatctcctgaagagtcgagatccagctgccgaagtggaagcctggcataccaggcaagcaaaaatgaatcgcgctcagccgcttctaatatgccgtggaaaatcgcttcctccaaactccctccgagtgcacagccgttcgatgtttcatagacaaagctgtcttcccgccccaggctgtaatacgcgagcgattcaggaacgagaatcggccgtttctgcagaaatgaatagccccatacccagcggagcgggcgggccggatgaaacggctgaaaaggaaaatcgggatgcgtgtattgttcggcttgatgaagcccgacttttgccgggtcgagcgcacgatcttttacattttcataggtgtcatgtacgaccgtccgtttgccgcgcggttcaatcccggaatagcgttccaaaccttctaaaatggcggttaattcgctgtcttcatacgaatggctccgcccacctaccccttcatttcccatccataaagggatattgacgatcatatcggcaaacggcagaatcgcgtcataaattttggcgttgaatatccccgttctctggtccaaatagtctttggagagcgtttgttttaagtcgtccgtgttccgcacgcgaaagctgtccgggttcgttttcaggctgggccggagcgatatccgcgcggattccggtccgtcttcgggcagatttccgcatatagggcatgtcggttccggtatgaaagcgtgcagcgaactttctagcgttttcaaattgacgatgtacagctttttttccaatcggccgcgcccgccgttcatgatggtgtcgacttctgtgcagatcaggctgaccatctggcggcagccggtctttgaagcccacggatcgcggtttatgtcattgcttttttgttccagttcaagcgtctccatgctgtcggggccggagacataccacctcatatcggcgcattttgaacatcctgactctgacggataaacgagcggcccgattaccccttccccaaaagatgcaaacccgcgaagccagggaatccctgccgcccttagcactttttcggcctcgcgatataacaaaggccgccaagcgtcgtgcagcacaagaacgaacgaagtctccgccggtattctgttctcaaaatcagacctgcggataacgttatattcagcagataattgttgtgatgcgccttcagccatcaatccttcgccaacgaccaaaatacagcgcttcatcaaggttcctcctttcgcaactgcacgcaatagattcctgctagtttttcttttaaaaatggttcaacaggcagctcatagacatacagctgcaagccccggttgtttttcaaggcggaaagcagtgttttttgcaaagcagctgaaacggggatagcaagcttcagttcaccaggctccagcagaacatccgcacctttcaaaggatctttgtctgtcagtgcccgttcgagcacttttctgagagcggatgtgatgttgagtccagaacttctgtaccagcgcccgcgaattcccgcccatgcgacagggaagccttctatgtttttccctaaaccgatttccggttggccgtacaagactgtcagcgcttttaaataaaatgcagaatgccggtcttcgattccgtccagctgaacgagggaaatcatttcttttccgctttttatccgttcgcacaaccggtgttccaggcatttctccaatccccttaatacgccttcagccagcgtttctccggtggcgatcgcgaaatctccgttattcggataagaacgggtcaaccttgatgcatacatttcaatccccgtcagcccggcttcccgccgcgcctcttgatgggtcaaaccgaccgaaaccgtctcaggcaaaagctccgcaggtccggaagagagcggatctgctgtctgaacaaagcattgtgctaatggaagctgcggcaaatgtttttcttcccacagatgaaaaatgcccgttacgggtgaggtcagttcggtgaaacattggaatagccggctttctgtttcttttccggggtgttccgaaagtttcgcttcaaggtcgcagatgagttcagccgaatccttgccgcaactgaagtccggatggggaagaaacgcatgccagccgccttcgagcgttgccaaatcaagcaggtacacttgattcttcttagataatggctcaagctccgcagctgctttcatcaattcgaacacaataacatttgccagcatgtcttttcctgccaaaggaaaggttccaagcgttcgttcttcatggagcgcagaccgatggaggcgcctccaggcagcctcgaagcggctgtctccgtgttgttggaagacagggcctgccagtccgacttgtttcagacagatgccgggtatgaatcctttgttctcttcaaggcaaaacgtttgaagatcgtggagatcatctgtgaagccgcggtcagagacatacaaaacccaatcggcagatcgcaccgcttcccgccaatgttgcgtttcggcgaagccaatctccagtccgctttctgtttgctctgatatttctgccagttcgtctaaagcatgcccggatgcatccgtcacgatcgcacggattcttgaaaaaccggaatcgatcagcgaccggaccaatttcgtgagaaaggagccagtccctgcagccaatattttggtttggcgcgacagctgaaagcggtaagcgccggaatcggcaaagctttcaataaattcgatttgggcttcatacgttttaagcactgagctttccagtttgtgcgggtgatcgcggctgacgtcgcgaacgaatccgtttttataaagcgtttctccgatttcatatactctctttcggtacggagcttgcagtccttttgtcaaatcttcaagcgaatgttccccgttgaacattggcagaagtttttcgaaccattgagcaatcgaagatccttttatgcgaaacgacccggaattatttctaaaatacgcgccgccgttcggatcaggaagaaaccatgtatcccggtttactttcaggcgagcggaagcagtcaggtgtgtcatgctcctcctcctttaatgttttaaaaacaagacataccattatatgtaattttgtttgtcctttatgctataaaagaccccctgcggcaaaagaggcaggggaagtcttcttttttataaaaaaactacatgcctccgtgccagcagctccagcagcaatgtcccgcacagctccagcagctgtgtcccgcacagctccagcagctgtgtcccgcacagctccagcagctgtgtcccatgcagctccaacagctgtgtcccgcgcagctccaacagctggcacagcttccgcagctccagcagcttgcgcagtgtttaacattggcgtgatggcggtccggatcccaatgcgtcatatcgtctgcctggaagtgatccatctccaacgactgcagttcatcatggaatggttgcattttaatatcccccttcatcgttaaaatttttgaccaaaacacagtaaaagaagaatgaaacataagcaaagtcagattaagtcaaataccccgggtactcacaagatcaaattatgaggtctgttaggtggttgttactaatttgaacgcctatttttcctgttattggattttgttggagggaggtttttattttgcggccatacttgcggcagtttattgatataaagatcgttggaggctgggagaggatgaaatcctaggctaagtagagatgtagcatcaaagaatgcaatctatgaaaataaggtattaataaaaatttgactctaaaaaaacggattcgattggtaatgaatttcaatgtagtgaaagtcgaattctcaagggaaagtcgtaaattaatgcaaaaataacttctggaaacaaacatctaaagtaaagaaagcatagagggtaaaggtagctattcggcttacggattagcaggaaaaaatcaattggcgttgtatatagcagtgaagcatcttctaaggacacagtgctcttgcagttttatgctgatgcgaatgcttatgtatcagttgctacaaaaactctttcaacaagtatgctttctaataatttgatagagaaggagagattgccttggccaatttttcaataataaatgcggttattgtattaggagtcttactattaattgtttgggggattgtctcctttattagaaattcaagaggatcataacatgatgaaaggccggacaacagaccggcctcttttaaatcgttatttcacaatcagcacggggatctccgattttgtcgatatcttgtcgctgacgctgccgaacaggagctttttcaggcggttctggtcgcgcgtacctgtgatgacgaggtcagcgccgatgttttccgcatgctgcagaactgcgttggccgtgtctccttccagcacctcgatttccgcgtcgtactggttttcgctcaatatgattttcgctgccgcaatcgcttcttccgcgctgtcctcgtagatcatgggttcaccggccaagtctgaatcgcgggggatccggggtgcggccgggaagccgctgtaaaggtatggcgctccggcagctggtctttcggccgcagcctctgttctcacttgcctcggttcatggacatgggcgacggtcaattgtgagccgagccttttcgacaggtcgatcgcttttctcagcgcttttttgctttcctcttttccgtcaaacgcgactatgatccggtcagctttaaacaaattgatcattcctttcagaatggatttactgtcatattacccgttttcccaacaaatctaacgaaatataagaatatgaatcaaaagcctgccattcgccaaaaaaacaaattgacaattaaagggccgtactataagatggaaaatattaataagattggagggtatcgtcatgattagaaatatcaatgcatcagttcaacaacaaaagcacctaaacgtgacatttccataccttccttatgctcaggaatccgtttcactctaacaattttcagaaggaaggcgcatgtcgcgtgaacaagcgtacatgcgcctttttatattaaaaaaggcatgctggtacacagtgtgccttttttttcggagaaaaaacatcctgtttccgatgcggagcagcatgtttttccaataaatcaaccgcacataaggaggaattttttatgccgagtatcagaaaaaacgaaatcaaagattgtaaggaaaaacttgaaggcggctaaaaaaggagaggatatcgatgttttctgttttatggaagctgggctggttttttaaagcctcatggcggcgctacacgatagcggtcgtcctattgattattgtaaacgtattggaaatgtttccgccgaagctgcttggcaacgcgattgacgatatgcaggcgggcactttttccaaggccggcatgctcggctatatcggtttatttcttgcgcttggcgcagttgtttataccctgtcctattattggatgtatcagctgtttgggggagcgaacctggtcgaaaaaattctcagatccaagctgatgggccatttgctgaaaatgacgccgtctttttacgagaagaaccgcacaggggatttgatggcgagggcgacaaatgatttaaaagcaatttccatgacggcgggcttcggcattttgacactggtcgattcgacgatgtatatgctgacgatccttttaacgatgggttttttgatcagctggaaactgacgcttgcttcgatcattccgcttccgctgatggccgccgccatcagcatctacgggaaaaaaattcatgagcgtttcacggaagcgcaggatgcgtttggcgctttaaatgatcaagtgctcgagtccgtgtcaggggtaagggtgatccgggcctatgtacaggagaaaaatgatgtcagccggttcaacagcatgacggctgatgtgtacaagaaaaatatgaaagtcgctttgatcgattcgctgtttgaaccgacggtgaagcttttggtcgggatcagctatttaatcggtcttggctacggcgcctatcttgttttccgcagccagctgacattgggtgaactcgtctctttcaacgtgtacctcggcatgctgatctggccgatgtttgcgatcggagagctgatcaatgtcatgcagaggggaaatgcttcgcttgacagggtaaatgaaacattggcatatgagcctgatgtgagagagcccgctgaacccgaagcagcggagccgggcgatattgtgtttgacggggtcacttttacgtatccgagctctgcgtcggaaaacctggccgatatttcatttaccgtattagaaggacagacggtcggaatcgtcggaaagacggggagcggcaaaacgacattagtcaagcagctgctgaggcagtatccgcaaggaaaaggaacgatcaccatttcgggcgtgcccattgaacgtctgccgcttgatcagctccgcagctggatcgggtatgtgccacaggaccacgtgctgttttcaaaatcagtgaaagacaatattttgttcggcggacacctcgctgaagaacgcgatttgcacgccgtcatctctgcagcacatctgaaaaaggatattgagatgctttcagacggcttggagacaatggtcggagagaagggagtcgctttatccggggggcagaaacagcggatttcaattgcgagagcgatgattgcggagccccatattttaattttggatgattcgctgtccgctgtcgacgcgaaaacggaagcggcgattattgaaaacatccgcagcagacggaaaggcaaaacgacgtttattacatcacaccggatgtcggctgtcgaacacgccgatttcattctcgtcatggaggatggaaggatcgttgagagagggacgcatcaagaactgatcggccggaaaggctggtattttgaacaatatgaagcacagcagcttccttcgggagaagaagggggcactgtagcatgacaacaggaaaaaggcttttccaatatgcgcttctttataaaaaaattctcatctgggcgctcgtcatgctgacgatcgccgtcacagccgagctgactgggccgatgatcgccaaaaagatgatcgacgatcatattctcggaattgaaaaaacgtggtatgaaacgacagagaactcgaaatatactgtttcctacaaaggaaaggaatatatcagggaagacaggacagacccttcagctgaaaagctgcaggaagttcacatctttcaagtcggtatgaactactactttgtggggaaaccggtttcctttgacggggagcggacggtttccgggggagagctgagaatgacgagcggagaccggacggaaacctacaaggccgatcgcctgtctttgtctgaagtgtatgctttttacgagcctgaaataggagggctgatctcgctcgtttctatttatttcggccttctcattttctcgatctttttccattacggccaattctacctcttgcagatgagcgcaaaccgcatcattcaaaagatgagacaggatgtattcgccaacattcaaaggcttcctatccgctattttgataatttgccggcaggaaaaatcgttgcaagggtaacgaatgataccgaagcgatccgcgatctgtatgtgaccgttctttcgacgtttgttacaaatatcatttatatggccggaatattcgccgcactgtttttccttgatgtcaggctggccggcgtctgtctgttgattgtgcccctgattgtcatttgggctgctgtttatcgaaaattcgcttcaggctacaatcataaacttaggtcaatcaacagcgagatcaacgccaaaatgaatgaatcgattcaaggcatgacgattattcaggcattccggcgcggacaggacacaaaagaagaatttgaacagctgaatgacagccactttcattaccaaaataaaatgctgaaattaaactcgcttatgtcccacaacttggtcaacattctgagaaatgtgatgttcaccgctctaatatggtatttcgggggagctgccctgaacgcggaaggaatgatttcaatcggcgtactctatgcattcgtcgattacttgaatcgtttatttcagccgattacgggcatcgtcaaccagtttgccaagcttgaattggcgcgcgtatcatcggagcgggttttccgcctgctggatgagccgggcgtcgatgtcaaagagccgagcagcgaaagagcgcgggggcgagtcgtgtttgaggatgtatcatttcgctatcatgacggtgaagatgtgctgaaaaacatctcttttgaagcgaagcaaggggagaccgttgcattggtcgggcatacgggctcaggcaaaagctcaatcatgaatgttcttttccgcttttacgatattgaaaagggcgatgtcaaaatcgacggcagaagcatatatgatatgtcaaggcaggaaatcagaaagcatatgggcatcgttctccaggatccttacttattttccggcacgattgcttcaaatgtcagccttgacaatgctgatattactagagagcaaatagaagacgccttgaaacaggtcggggctcttgaggtgctcgcccgtctgccgaaaggccttgacgagccggtcatcgaaaaaggaagcaccctttcttcaggagaaaggcagctgatctcgtttgcccgtgcgctggcatacgatccggctattcttattttagacgaggcgacggcccatatcgataccgaaacagaagcggtcattcaaaaagcgcttgacgtcgtcaaacaagggcgcacaacctttatcatcgcccacaggctgtcaacgatcaaaaacgccgaccagattctggtgcttgaaaaaggccggattatcgaaaggggaaatcatgaagagctgatgaagcaaaaaggccaatactatcaaatgtatgaactgcaaaaggggaaaggaaccctgatagggtaagccggatcttcacccggccttaataagcgagccccaccctcgccttgacaaactggtcagactctagctgtgtaaaaagaaaatgggcggtgtcgccggtggatatttctcttccgccgggcggcagaacatcctgttcaaaacggtatgtcttcaatgccggcccatcggggagatacgtcgggcagacgatcgtccaatccagatcagattcgcggagccgttcgtacacacgggcatgttcttgagctgcgcgcgtagagcgccgttttgattcgtttgtttcaaagcggtaaagggccgggttctgccttgcgtttaaaatgccggcggttccgatggtaatcagccgtttgatccgatgtacgttcatggcgtttatgatgtgttcgatggagacggtcaatgtatcgtctccatctgtgtttaaacagctgacaacgatatcgcaatcttttattaaagactcgacgtcatgccggttcctggcgtttcctatatgtgcttggcataaatccggaatgcgggcgccttccgtcctccggacaagtgcgttaacggaatggtgcccatcctcttcaacaaaattgagaaaggcctgtccgacacggcctgtacctccaaaaagcgcaatcttcaacatgatcactcccatcggatctatcatacgtcagatcgtccggaagaaaaagccccgcgtaaacaaaaggttccatgataaggacggacatttgagacatactcattcaatagagaaatcccgacaaattgaatcaattcccaattgatgctcaacatcagctgcatgccgacccctcctttataccagcatatgaaaaaaggagaagcgggtgcgggctttcacaagatatgccagaggggaggcccccgtgatggtaatgaatgagaaggtttgccgaaaagctaaagaaggtgcagtatatgcaccttctgttatccatgaatatgaagttgtttaaaattgttgaccgcccatagatgcttgagcttgggaaactaaacgttttgtaatttctccgccgacagaaccgtttgcacgggaagtcgtgtcagcgccaaggtttacgccgaactcagaagcgatttcgaatttcatttgttcgatcgcttgcgctgctcctgggacaagcagttgatttgaagaattttgattagccatttgtcatcaaactcctttataaaaatggtatggttgggctgactggagttgcaccagctgacggcttccaccgatagaaaaccgctgccttctcggctaaagcccaatgttggtttgtactacgtattatggtggattcaataaaataaatgcgcgtttcaatctggtaaatgttgaaagacgaaaaggttatgattggggcaagctaaggaaaaaagccaggaggatgaagaagatgatgtgtccagtgtgcaacgggattctcgtccagacgaggcattgtccgaagtgcggcggggaaatggcggacgccgggagagcaaccgattttttcggtccttacagtccgtacatggagttcgattcatttaaacaaacgcaaaccgcgtgcgttcatttatatacgtgccaagactgcacttatgaagaaaccgttgaaattgaaacgaccgaagcatagctgcatagagagccgcagcatgcttcggtcatgtttgaaactgtgttatccttcagagcggatgcggagctccgtttctttatcaaaaaagtgagctttattcatgtcaagcgccagtggaatcgtatcgccggcctgaacgtcggtccttgaatcgactctggcgataaacggctgagtgccggcctgcgaataaagcatcgtttccgcgcccatcagctcggctacctcaattttcgcatcgactttcgagtcttttgacgcttcaatgaaaacaggttcatcatggatatcttcaggcctgattcccatgatgatttccttgccgacataaccctggccgcgcagaactttcatttttccttccggcacgcgaaccgaaacgccgtcgaatgtaaacatgtcttctttcagagtgccggtaaagaagttcattgcaggagacccgataaagccgccgacaaacacgttttccggattttcgtagacttccttcggcgccccgacctgctggatgattccgtctttcatgacgacgagccgcgtagccatcgtcatcgcttccgtctggtcgtgggtgacatagatggtcgtcgtctgcagacgctgatgaagctttgtgatttccgcgcgcatttgtacgcgcaatttggcatcaaggtttgatagcggctcatccatcaagaacacctttgcatcccgaacaattgcccggcctaaggcgacgcgctggcgctgtccgccggaaagcgcttttggctttctatccaaatattgttcaaggcccagaattttggccgcttcatggacacgccgtttgatttcatccttcggaaacttccgcagcttcaagccgaaagccatattgtcatagacgttcatgtgcggatacagggcatagttttggaataccatcgcaatgtcgcggtctttaggagcgacatcattcatccgtttgccgtcgattgtgaattcgccatccgtaatttcctcaaggcctgcgatcattctgagcgttgtcgacttgccgcagcctgacggtccgacaaagacgataaattccttatcctcgatatgaagattaaaattatccacagccgtaactttgttgtcatacactttgtatatccgatcgagcacgagttccgccattttttctccccctcttttatgtaagcgctttaactgatttaagtttataaaaaacggcagggcggtgtaaatggacatggtgcacaatttcttttcgtgcatattgctgaagccgctaaaggagatgcatcatcaaataaacagcggctgcttcttcaaactgtctgatgtcaattgcagtccgttcgataaatttatcaattctgtactgcaggctgtttcggtggataaacaaacgtttggctgtaagagaggcattcaggttgcatctcatatacgttttgatggtcagggatgtctcgggatcagacagcgcttctcttacggcgtccgaaaatgaagaagcatgaacccgctccggttttgccgtcaaaaaagacgggaggcactggcaaaacgtggcgacgtttccgatgtcacccgcttccagcatgtaatgaaacatttgtttttcaaagcggattttgccttgaagcgatccgttgactggatgaagctggccgctgaaaaacacaggagttgccatgaaatcgcttgtcagtgcatccgcaagctcggacagctctttttttgcgagaaacggtgaaggattttcgtggacgataacggcttcatgccggtcgtaccatacaacaagcgggtctttaaaaaagccgctgaccgcttctttaatcgcctgtctttcttcaggggcatgctccattttaaaaaaatggccttgaatcagctgaatgtttcccgggttttggaggggggcatcgcaaaagaaatattcgtgccattctttctcccgctttgtcagctgctgcggacgatgcggttctgaaaaaggccggaataggcaatagagcagctctttttcccggtcggtgaccgcgcttttcaaaacgccgaaagtttcgccttcgtcggtttgaaaccataatgcatcgtgctttgaaacagccttagatccaaccatccgttcaccgtaaagcgtctttaatttctccagcatacgtcaacgtccttttctttactcgtaaatatggaagagcattaattcatgaatttcgcttttcagggaaggctcgtcatcatgcgggggataggtgctgccccactcgatttcccccgatttatgataaattccttcataatgaatccctttatgataaaacgatattttccagccgggaagcctttcttttttaaacagcggcttccattgaaagtgagaaatcattaacgccacgctccttcattgatttcaggtgggcaaaatccagcgagcagactaaacgttgatttgttatcattgtatctcattcacagaaaagatcatagattcttttcaaatggagattttcaaaaaaataccgtgaagaagcagattcttcacggcttgaggtcatgccacatgtcctccggattaaggattgactgttcggttaaataagaagcatattcaaagcttcttttcttcgttaagcggctgacagatgccagacggggatgggagaagattcctcggccgggccgggagttggcttcaaacagccacacctttcccgaacggtccaatcccaggtcaaagccgatttctccgatgaaaccgtcaagcttttcgtcaaggacccggctgagaaggaccgccgcttttgtcagcttttgcagagtgtgaagcctttcctgaggatcatcataaatctctgcaagtgttttcacggcgccgccgctcgacatatgggttgtaattccgtcctttccagcgattttggccgcgatggctgtgacggtccattgaccttttccgtttttgtttgtatgaaccctgaaatctgccgggtgatgatccacttcgatccgttcgatgccttgctgggcaagataagaagtatgtttgtgaagcatctgccattcttttaaacattcagcagcggacgaaaaagatgtgacgccttcggcatgtctggcaagaataccgttttcttcccgttttgaaagctggaatatgcctttgccgaaactgccgccggcgggctttacataaatgaagccgtattggtcgatcatgtcttcgattttatcggcatcgggctccaatgccgaaaatggaagcaattccgctgtcctctcgtcttgctgcagacattcatagatctcccatttattaaagaagcccggattgaaccacggaatgcggtattcatccataagccgtttttttgtttcccgcaaggcggaggattcttcggctttgcggttcggcagtctgtcgtatacaacattaggcagcgggactatggcctcctcccagccgttttccctgaaaatgagagcctgcaccgtgccttcttcccaattaatctggtgcgccccgaacagatagctgtagcctcctgccgggagatccatcgtcaaaagcttcgaaaaaaataaagaccttcctctgacaggatccagctgcgattttgtgaaaccggcggtgaaaatcccgattaaaggcccgatatagacggtattgtcgcgaaaaagcagggaggctttgccgcggtacggaatccgcaggtttttgtacagattttcggataataaaacggtgcgcttcaaatggctgtcaaatgagacatggcaccgttcaacactcgtaccgaaagcggcgaataacagaccgtcctgtttgaaagaagcgggcaggagcatcgtgttttcactcgtctggtggatgccgaccgtcagcggttgaccggtcatcttttctcagcccctttcgcgccggctgaagccgttaagaatgagcagtactccaaaggacctttatacaaaagctcccttttttcaggagagtgcttgataaaagcgtgttttccgggctttgagttgacatccagcagccagacttttccgtcttttgtcaggcagatatcaaggccgagctcgaataatggcccgtgatttgattcaagcgccaggggaacggcctgcgccattgtctctaaatcatcgagaaggacggcctggcgctttttcggcacggataaaagccagctgtcaaagctcaccgcctcagagccaccggccaggtttgcaagcagtccatgctgatagctccgccttaccgttttaccggctgtttcccattcgccatagccgtttttctgtagcagcaatctgatatcacaaggaaaaccgtccttgtcttgaatatcgaggaacgattgcagcagatagcggtgctgaagaactttttggcaccacgtttcaaatgaggcctgtttcgaaaatgatttcagctgtttgtgttttccggtttggtaggctgcctttaccgtttttcccgtaagctcaagatgaatgatgccgcggcctcctgatccggatgcaggcttcaagatgcatgatttttcttttgcaagcttgcgcaggatatcctgggcattttctgcaatcgttgttgcaggaaggtaggacttgatgacgggatcggctttcaatgctttgtaaaccgtccatttgtcaggaagtccaagtcctaaaaatgtcgttttaggatactttttgagccattcgacaatcggttttgcttttttcgattgctgatctctgccgtaaaagcagcggtcatagatcaattccgggatttctctttcaatttcattccactgtcctgacttcgggtgaaaggagagccctttcacaagcagggaaccgggggaaatatccaggggggtgaaccggataaatcggattccgtagtccgaagccactttggccagttcttcggcataggctttttcatgtccgtgcgacagcgacataaatccaagcgtgatcatgattatacctccttcatgaaaaacaaggcttaacaggctgagactgtcaaacttcgggcaaactttaatatatagacttctgtttcatgatacgcttgagattgcagaaataggcttttgtaaattggaaatgattaaaaattttagagcgccctttatacaattgccatctgacccattgtattttgaagcggcttgatccattccgttatttgcccgtcttttattcagctactataataacgttaggcaagacggtgaggatcatcgtcaagacacacgctgtacagctatgatgtcaggtaaaaaggaaggcagttgaaaagaacatgtatgtatttggaatttttgccgttatgattgcagtcggtgcacttatcggcgctgtaacgaatcattttgcgattaaaatgctttttcgcccctataaagcgatctacatatttggaaagcgggtaccttttacgcccggattaattccgaaaaggcgcgatgaattggcgagacagatgggacagatggtcacaggccatctgctgactacagaagggctcaaaaaaaggcttgcatccgatgcggtcaaaagccaggcggtgcaggttggagagaggcttttggcccgcctctcgcaatcaacggccaccgttgaagaagcattggaaagcatcgggatttcaaaccccgcccaaaaagcggatcgagcggtatccagattggcggatgagaagctgtccgcatttttagaggcgtatgagaatgaaccgctgaaaaagcttttccctcttgaggctcaagaaaagctgaaagaaaaaattccgatggtgtccagctatattttaagccgggctgtcagctactttgaaagcgatgaaggcaaggaacgcctcggacatatgattgacgattttttgaaagaacggggcatgctcggcagcatggtgcagatgtttttaggcaacagcagtctggttgaccgggttcagccggagattgtgaagtttttaaagaacggcgagaccgcggggcttttacaggatctgcttgaaaacgaatgggacaagctgaaagaatatacgttcaaggaagcagatgacaaatggaacctcaaacctctcattttcgatttgaaggaaaagcttttgaaacgattctcgcttcagccgtttttcgaaaagacgataggctcctctatttccagttttgagcaggatatcgctttgcgccttccgcagatggccgaccgccttctggaagaagcgggccgccgccttgatcaagcgctcaaacagctggaactcgagcaaatcgtcaaggaacaggtggacaacttccccgttgaacgtcttgaagaaatggtgctgtccatttccaagcgggagtttaagatgatcacgtatttaggcggcctgcttggcggaatcatcggagcggtgcaagccatctttgtgattttgatctgaggctgaagacggcctgttcatacggaattatcgtataactgtgaaaaacactccatagtttgttatagtggagtggtgccgattccataagaagaatacgggcaggaaaggagcggatcaatatgacggtcaatttacatgactcggcttatgacttggaacaagcattgcgtcaaagcgaagaatattcccgattgaaaaatctttatgatgaggtgaatggcgacccatctgctaaaaagatgtttgataactttcgcgatattcaattgaaccttcagcaaaaacagatgaacggcgaagacatcacccaggaagaggtcgaacaagcgcaaaaatccgtggcgctcgtccagcagcatgagaaaatctcgcagctgatggaagcagaacagcggatgagcatgctgattgctgatttaaacaaaatcattatgaagcctttggaagagctttacggaaatccggagagctgataaaaaatcccctcttgtcttgacaagaggggattttttcactaagtgaacaaataatgttcataaagatttaaaaaagacttgtcaatttgtgaaatagttgcgataatactaaatgtaagtgctttcatttttgccgggatacgatcatgaaaaacggactggcggcaaaatgataaggggtacagaggaatttgacagattgaaagcaccgtctgctggtcaaataaaggggttgtcaatatacggtgaattgaacgaaaggggcgttgaattcactgttttgaatatgagggagaatcatgatcgtatccacaagatgcgaagtaaaaagtctgtgaaaacaggctttttttagtatgtgcatcaagagggctgttctaaaaaaagggaccgggacatatcctctataacagattcagtcatcaaagaagggggacctcctggtgtcaaaacaaatgcttgcgctgaatatagacggaacgctgcttcggacaaacggacggcttcatcccgcaacgaaggaagcgatcgaatatgcaaagaagaaaggtgtatatgttacgcttgtgacgaacagacattttcgctccgctcaaaaaattgccaaatctttaaagctggatacgaagctgattacgcacagcggagccatcatagcggaaaaaatcgacgatcctttattagaaaaaaggatttctgaagaacagacatttaaccttgttcaaatactggaaagctatgattgcaatatcagaatcctccatgaaaaatattcgattggaaaccggaaaaaaacgaattcaaacctgctggggaaaacgatgattcacccgtctgacccgattttttatcccgtccagtttgtcgattcgctgagcgacatgctgatggatgaaccggtcagcgcaccggtgatcgaggtttattgctcaacaggacagtccgaagaaatcaggcagacgatcacaaatgcatttcctctcgtcgacatcattggagcgggggaaaaaatgctgattgtccataaaggggtttcgaaagaagcgggtttgacgatgctcgccgccgacctcggtctaaaaatggaagatgtcgttgcgatcggccatgaaatcgacgaccttccgatgatcgagcttgccgggctcggagtcgcaatgggcaatgcccctcaggaggtcaagcaaaaagcggattgggtgacgcgctccaatgatgaacagggcgtcgcttatatgattaaagaatacttcagaatgcagcaaagcaaagggtttcttaaaaaattccatattaaaaaagtctgattcttatagaatccccgctttcaacttgaatgcggggattattcattcatccctgccctgtaggaatgtttgtttcccggattgattttggccatttatttttgtacactaaagaaagttttgaaacgaaaaaggtgatgacattgcgcatttatatagaagggctccaagatgaaaggttccagagaccgcttgagcatatagccaacttattctttgaagaaagcgaagtcgtttttggcgaagaagcgccggcagaccttgcgatcgttctcggctacgaccgggaagagaacggcgtcaaggcttcgggtatgataaaagatacggacattagagcagaatatacgaaaaacattgaccccaaactgacggaaaaggaagcgtttaagcaggtgaagaataccgtttcctacgtttttttgagcatgcttcaggagcataccggaatcattcagaaatgggggattctcaccggtgttcgtccgacaaagctgcttcataaaaagctggagagcggcatgccaaaggaagaggcgcatgccgagctgaagcgggattatttagttcacgacgaaaagatcgaactgatgcaaaacatcattgaccgtcagctgaaagcggtacccgatttgtatgagctgagtcaagaggtcagcatttacatcggcatcccgttctgcccgacgaagtgcgcctactgtacgtttccggcgtatgcgatcagaggacaagccggacgggtcggctcatttttgtgggggcttcactatgagatgcaaaaaatcggcgaatggctcaaggagaacgatgtcagaataacgaccgtgtatttcggcggcggaacgcccacaagcattaccgctgaagaaatggatctattgtatgaagaaatgtaccgttcatttcccgatgtgaaaaacatccgcgaggttacggttgaggccgggcggcccgatacgattacagaagaaaagctcgcggtcttaaaaaaatggaacatcgaccgcatcagcattaacccgcagtcttacgaaaatgaaacgctgaaagcgatcggacgccaccataccgtggaagaaacgatcgaaaagtaccatctgtcgcgaaatgccggcatgtctaacatcaatatggatttgatcatcggccttccgggcgaaggggtaaaagagttcagaaactctctttccgaaaccgaaaaattaatgcctgaatcattgaccgtccatacgctgtcatttaagcgcgcgtctgaaatgacgaaaaacaaacataagtataaggtggctggccgcgaggagattgtcgcgatgatggatgacgctgtctcgtggacgaaacagcacggctaccatccctactatttgtacaggcagaaaaacattctcggcaacctggagaatataggatattcacttcccggccaggaaagcatctataacatcatgatcatggaggaaaaacagacgattatcgggatcggctgcggagctgcgagcaaattcgtcgatccgggaacgggaaagatcacacatttctccaacccgaaagacccgaaaacgtacaatgacagatttgaacactatacagaagaaaagcttcgctacctgtccgggctttttgacaagaatgctaaaggcagttaaaaggttcggtttaaaacgggacagtccctgggcaaaacgaaaggagacttcgccaatatcctggcgaagtctccttttctgtcatcctctttgttttgtttcggattttttccacttaaatattttgttcagtatatgaaaaatccgttttgattcttttgtcaaaagcggccccaaaattgccaggatcagtacgtacaaagcggcaaacggctttaatgtggccgaaagtccgccggcgattccgaggttggcgacaatgatcgaaaactcgccgcgtgagacaatcgttaagccgatattggatgaagctttatgagaaagtccggcccttctgcctgcgatcatgccggcgataaagttcccggccaaggtgaggatgacggcgccgattgaaagccataccgcatctcccagtgtaaacgggtcgatgctcaatccgaagctgaagaaaaacattgcaccgaagaaatcgcgaaacggtacaaccaaatgctcgatccggcttgcatgttctgtctcggaaaacacgagtccgagaagcagggcgccgattgcttcggcaacgtgaatcgtttccgaaaagccggcgacaaagaacagcagcgcaaaaatcacgataataaagacttcgtttgaacggatattaaacagccgatttaacagttttggcagcttcctggcaacgataaagaacaatatcatgtagccaaaagcgatcaaaatcgaaagcagcgccgatccgactgaagttgagtcaccaaggacgagccccgagacgacggataaataaacggcgagaaaaatatcttcgaacataatgattccgagaatcagttcggtttccggattcgctgtcctctttaggtcgacaagtactttggcgacaatcgcactcgaagaaatcgtaataaccccggcgatgatcagtacttcgagaaactcgaagcccgcgatgaacccgaacatgaggcctaaactgaagttgatcagaatataaatgcttcctccgacggtgatggaccgtcctgatttaataagctttccgatcgaaaattccagtccgagataaaagagtaaaaacaagacgcccattctgccgaaaaaggcgatgatctccgagctctcgataaacttcaagttgatgataccgatcgtcggagcgtgcgggcctacgatcatcccgagaacaattaaaaagggaatgatcgagaatttaatccgattcgcaattaaggcagcaatcgcgacaagcaagagtgcggtgccgacttcaaatactagatgatccaaagagcatcacccttcctttcgggaaagaaaagcctgcttcatttccttgaggttttttctttcaccggacaggacgagtgtatcattttcatcaagaacggaatctgccccgggattcaagaatttttcctgattctttttaatgatcgcgatgacagtgacgccgtagttttgcctgacgtcgatttcaccgagagttttgccgacggcatttgctcctttttcgattttgaaccactcgatgatcaggtcgttaaacgccatttcaatcgattcaagcgcctgcggcttatagaccattccgccgaggatggcggcgatctgccttgcttcgctgtcatcaagcgagatgttggtcacgatttcatcgggatcttcgtcgtcaaaccgatagatttctcttcttccgtcgtcatgaacgacaatcgtcattttttcatggtttctcatttctatttcaaattttttgccgatacccggcagatcactttctttaatattcaatcatatccctccaaaataaatttccccattcggctgaaaagttatgcaggtgaaaaagggaaaatcaggagaggtaattagattggtatttcacaggaatagcgcaagttttttttagaattaattcatttgattgaacctcgaatcgaggaatgaaatgagtgtagaaacgtgcgtcaaagacagaaatatttgcggctcttcctggatgattaagaaagctttttgtaaaaggggaggggttcactgcatgtgtctcaaactttgaggtgtttagagacatatggtattccgcttcgggatcaaaaacagggttttgctcctgatcggcgaatggtactgttaacatgcataaactaagcatcaacgtcaaaaatgatttaattacgcccatccccctttcctcacatgctttctataaataactatatataaacaaagaaaatcattcaactaaaaaggcttatttcagtatcaattgatcttgaaatggaaaatcattcagctgattttcacatgaaaaaaggtattgaaaataaaaggtggaattaattaagctaatatcttacaaaatcgtattcacggaggtgcaagatggaatatatcaaatggaaagacgaagacgggatttttgaaattgtactgaatcgctctgaggcgtacaatgccttgaatgaaaaaatgcttgaagaactgaatgaagctttgcgtgttgcagaggaaagcgaatcgctgcttctccttgtgagaggcagcggcaaaggattttcggcaggcggagacattaagatgatgctgtcttccggagatcaagacagctccgcccgcgtcattgacacaatttctgaaattgcggtgaagctttacagcatgccgaagatgacgacagcggctgtccacggtgcggctgcgggtctgggattgagcctcgcgctcagctgcgaccatgtactggtcgaaaaagaggcgaagctggcgatgaattttatcggcatcgggcttgttcccgacggaggcggacacttctttttagagcggagaatcggtgaaactgcggccaaagaattgatttggagcgggaaaaaattgacgggggccgaagcgcacgagcttcggatcgcagacgccgtattcagcggggactccggccgttttgcgcgcatctatcttgaaaagcttctgcacgctccgctggcagcgatgattgagacaaaaaagatctatcaggcgttgaatggaggcaggctgcagaaaacgcttgaactcgagaaaacggcccagatgaaaatgaggctgacaagcgaccatcaggaagggatccgcgcatttttagaaaagcgccagccgcaatttaaccgtcagcaagtataacaagagcggtccggcaggaaattgaccttgggaaatgatgtgcagaaacaattgtaaaaaaatttaagtttccataaaatgattcataagatacagatctgtacgaagtcttgggaggcggcgaaattgaaacagaagattccatctgaatacgttgctagaaagctgaatgattggtacaacgccattcggaaaaatcagatcgccgccagtgaatcattgaaagcggaaattttaaatgattttcaagacatggaagaaaatcaggacgtcctgctctactattcgctgcttgaattcaggcataaactgatgctcagctatttgaaaccgaaagagactgaaaatattgaaaaaaacctccgcgacttagaagaaaaagaagaccaaatgacgggtttattaaactattattactggttttttaaagggatgtatgagttcaaacaaaagcggttcgtcaaagcaatcggctgctataaaacggctgaacaaaaagtcagcgcactggaagacgaggttgaaaaagcggaattttattataagcttgcggaaatctactattatatcaaccagagatacctgtcgatcaactatgcgacgctagcttccgacatttttaaccggtatgaaacgctaaaagaaaaaaagattttctgcgattttatcattgccggtaattgggttgaatcgatgacatacggacccgcgctgaaaagcctggccaatgcgcttgaagacgccaggaaaatcaaaaacagccatttgacggcagccgctcattttaatttgggaaattgctatttccaccaagaatcgtaccgggaagcctcagatcatatggagagcgccctttccatttttgaacaggaaagttcatcatatattcccaaagtgctgtacaacttgatgtacgtccgtctcaagcaggggaaccatgccggagctgccgcctgttatgaaaaaggcatccgaagcgcggcatcgctcggggatgaagaacacgcggcaaagcttaacattctgtgcgggctgtatttagacggaggggatcagaaagccgtggaaaacggatttgattatttggagtcaaatcatttatatgctgctgttgaagagctggctttagatgcagcccagtattataatcaaattgagcggctgaaagattccattttttactatgaaaagtgcgctcaggcaagtcgaaaaatcaaaaggggagatgcgttgtatgaaagctaaactgttgttcgtcgcggtgtcgctggctgttgtgttaacgtcttcaagctttttggcagatgcggggaaagccccttccttgtatgcggacaaaatgatcacgactgacaaggaggctcgagtttaagggcatgatttcatctgagaatgagcgggctgacgcagcgaaagaatgggcgatgtatattacagtttcttgccttttcatcctgatcgtctctgtgatttgttttttcgctccggtctaccgcttgcaggatctcttgtttcgaatgtttgatgctgtcatcatctgtgtgctgacggtcaatggtctttattatctgaaaaaaaataaaggcgtcgcttgcgcatcgtttttactcggcttcatcaacatgggactgctcgttgttttgatggtccgctagtgtttggcggataaagggcaggcggcggcagcgtgaaacttttcccccgaagcgccgccttacccgtattttagtcagctgcggaaaacaatgattttaccggacgaatgtactacccggtgtgtatgctccaaaaattgcttttccttcagcattcctcttcctttctctttcgcttcttcatcatcggccgcttcaaatcgctcattcaaaagcgtttctccactagtgtcgaaaacggttacataataattttccatttctctgcccctttctcaaaatatgatctatttgtttaaaattatataaaaatcaaaaaaatcctttttaaaatggtatgactaacgtatgattgtaaattggaaggaggagttataatgctcaaaatcgatcacgttacgaaaaggttcggttcatttacagccgtaaacgatctgacgctggagattccagacaagcaaatgttcggtctgctcggcgccaacggagcagggaaaacgacgacattccgaatgatactcggccttttgaatgcgacagagggtactgtcacatggaaaggacagccgattaactacggtgtcacaaacagcatcggctatttgcccgaagagcgcggactgtacccgaagctgaaggtgaaagatcagctcgtgtacctcggacgcctgaaaggcatgaccaaacaaaatgcgctcaaggaaatggagaagtggctcgaacgcttccatattacagaatacgccgacaaaaaggttgaggagctgtccaaagggaaccagcaaaaaatccagtttatcacggccgtgctgcacaagccggagcttttgattctcgacgagccgttcagcgggctcgatccggtgaatgtcgagcttttaaaagacgcggtcatttctttgaaagacgacggcacctcgattgtattttcaagccacagaatggagcatgtcgaagagctgtgcgaacacgtctgcattttgcagcgcgggacgcctgtcgttcaagggaaattaaaagaaatcaaacgttctttcggcagaaaaaatgtcacgattcacgcggacggcgacttgagcttcttgaaagaggcggacggcatcgtcaaatggcgtgatcattccgaaggagtccgcctgcaggtcgagaatgaagaagtctctcaagagctgtttacaatgctgcaaggacgcgggtttatcagaaagtttgaacttgaagagccttctttgcatgatattttcgtcgaaaaggtaggtgcccgttatgaataagttttggattgttctttttcatacatatatcagcaagctgaaaacgaagtcgttcatcatttcaacggccatcacgcttgcgcttgtcgtgctcgtcactaatttgggatcgattatttccatgtttgacgacggcggagagggtgacaagatcgctgtcattgatcgctcaaatcagctgtacgacacgtttgcccagcaggtgaaagcactcgacaccgatgaagcgctggaagtcgagaaagcggataagccggaaaaagagcttgaaaaagacgtcagagacgaaaagctcgagggcattttaatcctggagagagataaaaaaggggtgctgaaaggaacgtataaagcgctcgatatcgctgattccacagctgtctccacgattgaacaggcgctctcgcaagcaaagatcgccgttggaacggctgaattgaacgtaccacaggaaaagctgagcgaactgtttacaccggtaaaagtcaacagtgtcgccttgaaagaaggcgcgaaaaccgaggaagagcttcaaaaggcgacagggcttgtctatgttgtgctgtttgtcatctatttttccgttttaatgtacgcttcaatgatcgcgacagaagttgcgacggaaaagtcttcccgcgtaatggaaattttaatttccagcgtgccgcctgtccagcaaatgttcgccaaactgttcggcgttgccctattaggcctgacacagcttgccgcgctccttcttgccggctatctgtcgcttcagtccagccaggaaagcggaggggatgcggctgagctggttaaaggattttttgatgtttccggcgtacctactgcaacgcttgtgtacgcggtcattttcttgatgctcggctacttcttatacgcaactcttgcggcatttctcggaagcgtcgtcagccggattgaagatgttcagcagatgatttcgccgatgatcctgttggtcgttgctggattcatgattgccatgttcggactgaatgctccggattcgacgtttattaccatcacttcattcattccgttttttgcgccgatgatcatgttcctcagagtcggcgtgcttgatattccgttttgggaagcggctctcggcatcggcatcaccgctctcacgattgtgattctcgccgtcatcggggcgagggtgtataaaggcggcgtgctcatgtacacaagcggcggcggattgaaaaatatcaaacaggcgcttcgtctgtcaaaagatcgataatgaaaaagaaaagcagcttgaaagataagctgcttttttcatgcaaatagtagaacgtgcattcgctttcaacccgtggtagaatgggagcagaatgttttatgaaaaggagcagaagattgacaaacatcactttcattcatgcggcagatctgcatctggacagtccgtttcacggcatcagccagcttcccgaggagatttatcagcggatcaaaaacagcacatttaaaagcgctgaaaatgtgtttaagcttgccattgatgaacaggccgacttcattttgcttgccggggacctgttcgacgaagcaaaccgcagtttaaaagcacagatgtttttgagaaaacaatttttaaagcttaaagagaacaacatccaagtctatgtgatttttggcaatcacgatcatctgggcggcgattggacgccgattgaatggccggacaacgtccacatcttttcagcggaagacattgaagaaaaatcgttttacaaagacggccggctcgccgcaagcatctacggctacagctatcccgagcgctcagtttatgccaataaggccgctgaaatcaaaaaaacgaccgacgcgcccttgcatatcggcatgattcatggaacgctttccggggagagcggccatgacccgtactgtcctttctcccttcaagatttaaaaaacggacagatggattattgggcgcttggacatatacataaaagacaggtcatttcagccgccgatccggcggtgatttatccgggaaacacacaatcccgccatatgaaggaaacgggggagaaaggctgctatctcgtcaatgtttgcggcggagaactgtccttcgaatttaaagccgtatcggatgtcctgtgggaaacggccagcatcgatatctccgggacaaagcagatgacagagctgatcagcctcatgcacgatgcctttcaatctttcagaaaaagaggcaagcccgcatgcgtcaagatggtatggacaggagaaacaccctcttatttggcggaaggacaggccggcatcgcggacgagatccttgacatcttccatgaagaagaacgggaggaagacgcgttcatctggcttaccgcgatcgaagatcaaaccgatgccgccttgtcgggaatcgaacgggacgcttttttccaggagcttttgcaagaaatccatgagtttcaagatttcagcctgattcttgacgatttggagcggcatccggtctttagaagacacggagagctgtttaatgaggaagacttccgggacattcgcacgcaggctgaaaaactgctgcttcatgaactgaagacattgaaaagataaggggggatgcagggtgaatatacatgcgatacatatatacggatacggtaaattcgccaatcagacattccgcctgtctccttcaaatctgcatttgatctacggactcaatgaagccgggaaaacgacgctcatgtcgtttattgaaagcgtgctgttcggttttccgaagacgaaacggtacgagccgaaaacgggcgtcatttacggggggatgcttgaggtcggacaccctgatttcggccagatccgaatcgaacggacggccggaaagcccgagcgggtcaccgtttacttggaagacggcagcacgaagccggaaggttttttaaatgagctgctgtcaggcatcgacaggcagctgtataaagcgatctactcatttgacgtgttcggccttcaggaaatccataaattcaaccgcgacaaaatcggccgttttctgctgttttcaagtctgttcggctctgatgcgatttccaagctggatgccggcctcgtgaaaaagcaggaagagctgtttaaaccgaacggaaggaagccggagctgaaccaggagcttgatcggttaaaaaggctttctgaagatttgaaaaaggcgaaagcgcgggaaggcggctattaccgtctcttaaacgaaaaaaaaggcgctgaggcgtcgataaaggaaagcggacaactgctcaaagatcttgagcatctcgtcttacaaatcgagcaggccattgagattctgccggcggccgcggaaatgcgccagctaaaagagcagctcgcatccctcggcggctcagaagaaagccgtttccccgaaggcggacttttcgagctcgaaaagctcgaatcccacctgcatccaaaagcggctcagctgaaggcgctggaagaaaaaaagcgcggtttggaacagcgcgccgccgcttttgcaccggctgaagacttcctcgagcacgaagccgaagcggaagagcttttaacggcgtatccgttttaccagtcgtataccgaaaaaatcgcgtctttgactgaacagcttcaccagataaacggacgggttcaagcggggcttgaccgcctgcaaatcgaggaatacgatatcctcaatgcggacaccacgtatgaatacgagtggaaactgcaggaaacagttcaggcatacatagagctgcgcgaactgaagcggtcgctcgacgagcggtttgagcaggcgagggctgatctggaggaagcggaacaggcccatgccgctctcagcaatgaagtgatgcccgatgatgtccgaaaacaaaaggaagaaacccttggccgccttgcgtccgccggcggtcatgccggaaggcgggaagagctgatccttcagctgtcctatctgaagcaagaacaaaaagttcggatgaaaagaagaaggaccgcttttgcgggagcgctttgcgctgcttttgcggcagcttttgcggcgctctttttcaaggagtggttcccgggcgctttgctcgcgccgattttgctgatatttgccgcttttattttaaaaaagcctgagccttccgcggcggcggcttttattcaaaaacagctggatgatattgaccacagcggttcaaaaggcggagtaagcgacagcgctttaagggaggagctgtggaaggacgaccaaacccggcagctccttatcgccaaacaagctgagctcagacagaaagaagcggaatatgaaagagcgattcaaaaattcgaagagtgggaaaaggatatccgtccgtatcaggagaagaccgagcgctatttaaaagagctgaatctttcaattgacccgtcatttttagctgatgcgtacgctttgattaaggaactcagagaggaaattttgaaaaagcgggatatcgagaaggaactgagccgccttcatgctaaaaaagcatcctttgaagcgggattgagaaagcttgtcacatccctcagccttgcgggcggaagcgtccaagagcaggtgtttcagctgaaaagcgagcttgagtcccaaaaagagaaacttcgtcaaaaacaggaagcagacgtgtctttaaagcatgcggccgaacaaatcaaagagctggcgaaagaggtggaatacttccaatctcaaattgccgaactctttcaaaaagcaggggcggacggccgtgagatgttcgtcggactggcgaagcgcgatcaagccagaaaagaactaacggctaggctcgggcagctcaaaagagagctcggcagacaggacgagaaggccgttatgctcgcctcaggccactctctggcagaactgaaaggaaagctggccgagactcaggaaaaaagagcgcgcatagaaaagcagctgacagaagaaaggcagacggcggctaatttccatgcagagctcgccagacttgaggaatcaggagcggtatcggagcttgcctatcagaccgggatgcaaaaagagcgggtcgccgaattggccaaaaagtgggcagccgtcaagctgatccggcaggcggtccaaaacaagatagatgaacataagaaggttcggcttccgaagctgttacagacggctgaaacattactgaacccattgactgccggacaatacgaaaaaatttatttttctgaaacagatgattccatgatggtcatgcggaaagacggagctcttttttgcgcacacgaactgtctcaggcgacttgtgaacagctctatttagcgatccgattcgctctggccctctcccatcaaaagaatgtcaaattgccgttccagctggatgacagctttgtccacttcgaccaagagagatttaaacaagtgctgaacattttaaaaaagctttcaggcgaagatcagcaaatcttgtattttacgtgtcatgaacatgtaagagaagctttccgcgatgaagatgtgattctgctgccttccggaatgaaaaaggtggaaggaaaggagatgactaacaaataaaagtgtgtgctataatgattttatgtaggaaaacggagggagctttatcatggcaaaaggtatcatgctgcacgaagttggcgagcaggtggatttgtacttgctcattaaatcgtcaacgaaaggaatcgcaagcaacgggaaaccgtttttaacgctgatgctgcaggatcagtccggagatatagaagcaaagctgtgggacgccaagcagcaggacgaagtgacctacggcccgcagacgatcgtgaaagtggtcggcgacattcatcattaccgcgggcggaaccagctgaagctgagaaacatcagacctgcaggcgagaacgaaaacgtcaaaatcgatgactttcttgaaactgcaccgattcccaaaaacgaaatgatggatgcggtcactcaatatatttttgaaatgaaaaacccgaatatacagcgaatcacaaggcatcttgtcaaaaaatacggcaaggaattcattgattatccggctgcgacgaaaaatcaccacgagttcgtgtcaggtctcgcgtaccatgttgtttccatgctgaacctggccaaatcggtcgcagacctgtatccgtcgctcgatcgcgaccttttatacgcaggcgtcattctgcatgaccttggaaaagtaaaagaactatccggcccggtgtccacgacatatactgtcgaagggaacctgctggggcacatatcgattatggtgacagaaattgcaaaagccgccgaagagcttcaaattgattcagaagaagtgctgattcttcagcatttgattttaagccatcacggcaaacccgaatggggcagtccgaagccgccgatggtcaaggaagcggaaattcttcactatatcgacaacattgacgcgaagatcaatatgatggacagagcgctcgaacgggttaagccgggagaatataccgaacgggtcttcgcattggataaccgttccttttataagcccgtttttcacaaataagcgtcataacttgtctcccttttgcataatgtctggtatacagtttattcaaaaaagggggaaaagccgtgctgctgtttccgtggtgggtgtacctttgcatcgtcggcattattttcagcgcctataagctgatgacgacggcaaaggaagaggaaaagattgaccaggcttttatcgaaaaagaaggccgcatttatatcgaacggatggaaaaagaaaaagcaaagcgcatgaagcgtacactggatgaagatcaagaacagcatgaaaaatcggctgacagccattccatcgcataaaaaaagctgtccgaccccaacgaggggaggacagcttttttggcgtcagctgctgctgcttgtctgagcttgacgctggtcgacttgttttttcaactctttgtcttttacttttaaatcagcatctttgacaagtttgtcaatgacggattgcagttcagtttgatcattttgcttttgttcttggacttcttttttaagctcttttttcatgtcttcatatttgccgcgttcttcgtcttttttaatgatgtgatagccgaattgggatttcacaggtccgctgatttcgccggttttcaaagcaaatgccgctttgacgaaatccttgtccatgttatcgtctttgccgacccagccgaggtcgccgcctttttcggctgtaccgtcagttgaatactcttttgcaaggtcttcgaatttttcgccttttttcagctttttctcaacttcttcagccgttttcttttctttcacaagaatgtggcttaagtggattttgcctttcaggccgtcataatattcttttacgtcatcatcggttacttttatgttatcctttgcggctttttgcatcagaagttcgtatttgatctgttctttgacgaagtcttcgcctttttggtcaatgagctggttgagctggtcacccattgattttttgtactcgttcagctttttgtcgatttctttgtcggagacatcgtatttatcatcgagtactttttgctgaacaagcatgttcagtgcgtccgctccggcattgtcttttaatgtttgataaaggtcttcttttgtaatatttccagcttttgtttccgcaacaacctcagaatctcccccgctgcatgcgctgagagccagcacgcttgtcgctgtaatcgccgcaattgcaatcttcttcataaatgcaaacactcctaatcataacagtttaaactttcctttgaattgtatcatatcatattctgacatgctgtaaaaagattttcaacagaggggcatccgtctagtcaaattttctttccgctcatacaaatatattgatcaagaaaaggaggtcaataacatgagcggaggatactcaagcggttttgctttattggtcgtgttgttcattttattaatcatcgttggtgcagcttatctgtactaaaaccttagaaaatgagaaaagaaccgtcattttttcaggcggttcttttcttttggacgatagcctaatcgtttcatgacattcgtgcatacactaatgtaacgactggggcagaggaggtgtcaatatgggcgacggttatgcaggaggtttcgctggcggctttgcgctgcttgtggtgctgttcatcttattaattattattggtgcttcttggatatgctaataaacaaaaggatagctgccggatcaatacgatcggcagctatcctttttctttacaccgtaaaggaaatctcaatgaatgatgagatcaataaaattaagatcagcacattaatcattctaaataccttatcctgccgctcttcaggaatctctctgacaaggcataaagagtttgtaagcttgtttatgttgaagacagtaaaaaccgcaaacaagatgaaataaaaaaggatgataggagatccccctctctgtttctgctccatactacattaccaaatatttattaaaaaagatagaaaatagactgaaaaaaaggaatttccaactgcctagcagctggattatttttgtattaaaatatcaaaatcgtcggcttcctgatcgacaaagcagtttttaggcgctttgatcagtttccaggcaaacagaaaatcaggcagacaatagccgaaatgaatgcttgagatgatgcagaaatagtgagcaaagctcggcatcgccgcccccgcgtaaaacaaaacaggcgtgatgaccaaaaaagggcagagaagagagacaagcatcatgtttttcggaatttctctccatgttctcattttcaaccaataaatctttttttctaactttttcttgctgatcatcggcaagatatgaagaattttatgggcgattatagccgcaaccaaaagtcctgcaaacaaaagggcatgatcgcctctctgaacagtttgcggatgaataagctgcatcgctaaatattcgggaataaaaaataaaatcattaaactgacggcagtgagcacgatgcgcatgcctccataatctttaacgagattgatggttttccagcaactcataaatgacatccttccgtttcaacaaactgttatatgaaatcctcagaataatttactcctctggatgagaaaaatcaatccctttttcgaaaaaaatttcgtcattttccaaagaatttagaagggtgtaaaaggatcagaaatctccagtgttgaactttcatcagaagggaatatcggctaaaataagagaaagggagagaagagacaaatatgaactcaatggagcaacgcctcgagcggctggaatattacatcaaactgttattgaacaatgcggatatggaagagtatccgtactataaaatattgatcgaaaagggcttatcagaggaagaagcaaaggaaacggaaaagctgtgcgaagagctctcaaaggagcttgaagcacaaaaagcgcaaggatttgtgatgttcgatcatctcctcacgctttttgccggacagttaaatgaaaaacttgaagtgcacgaaacgattttcgcccttcacagacaaggtctttacaaaccgctgatgagcgaattcatcagcattatcaggcagtacgatctggcttagtttttaagaggctcaagcggtttgtccacctctatcgattccccggcttcttttgcttcttgttttttcttcattttgccctcttcgctcgtaaattcattttcgatgtttgaaaacgatttttcgaaaatttccatgaaatcatcgccgtaaatatggcggatgatcgacatcatctcgacgatttctggaaacttcccgtacagctgatgaaggggctgagcgccttttaagacggcgttccgggtcggatcgtaagactcgaggattttaaggaaaacttcttcacctttcggagtcagctgaatgtaagtgttgcgtttgtcattcaattttttggaaaactccaggtaacctctttcctcaagcttttttgaaaaattaaacgctgtggatacgtgcatgacgccgaacttggcgatttctgaaatggatgctccgttcagctggtaggcgatccacaaaatatggtgctcgttaatgttcagatcataaggtttaatccactgctgccaatccttttctatcgacttccaaagcgccttgctaagctgtgccattctttgactgaataaaagggcttctttcaccgtatagggctcttccgctcgattcattcacttcacctgcttctctttatcttataatttctattatgccaataaaataaagattaataaagatgtaaatttacgaattttttaaaaaatccagttttacggtgtgaaatcaggattttacctaaaaaaggagcgtgaaaattttccattcacaccccttttttaaggtttatttttttcgctgagtatattagttttgtaaggttttctccagctgttttatcttttcttcgatctcagcgatttccttttttaagtcctgctgatgaggtttgatttcctcgcgccattcctggatggacgtttgcagttcgctgccgacgtctttaatgatttccgcgccttctatggcggttttgacgaattgctcttttaatgcgattccgtcgtttttcagccttttgacggtgtcttcccatttaccgcagttggctttaagctgtcctctcaagttttttcctgaagtcggcgcggtcagcaatgctgcaacaccgccgataacaccgcctacaatcagtccagctgctaaagatcggccttttgacatgtaaatcaccccggttatatttttaaagatcaggcttggcaggcgccggccttctcatgattagatattggcgtccgagccgggcaaaccgttcctcttcttagaaacttctgcatagcttgctttattttagcatacttttttaaaaaggagggagagggttgtctgtcataatcattgttttgacaattataagcgctgtgtttaccgccggctccttttattatttaaggcttctcggatattctgcatcttatccgccgaaacgcattcttaaacaaaaagcgcttttttgcacgggaagcgcagggttggcgctcctgctccttttttttattcagcttcttatataaaatatcgggcggattcccctttttttgaccatcaaaacgaaaaaaacctcttccaaaaaagatattccttttctagaagaggttcttgttttatttgacttgttcaatcagccttgaacgcttcatgatcgactgcacgatcggaaagatgaccgccatggcgatcgtgttgatcacggcagctggtaaaacgacaacagagaacagggtgatgaatccctgatttccaggcaggccgacaatgaacagtgcagccgtgaggaaaatcgttccggaaagaacggttcctgcagcagttaatccggcggcagcaagcgttttgctgttcagctttttcacaagcagaaatacgccgaagaacatcaaggctgttagcggtttgtcgatgatgttgggcagctgtcccccgggaaaagccgtcgtcaacgcggaaatgacgcctgtcacggctccgatgacgagaacattttgcagtctagggaacaaaaggattcccataaacatcatgatcagcatcatatccggcttcattccgtagaaaaaaggcggaatcacagcgtgcagcgccgctccaatggcgacaaacagggccatagccactaattcttttgttttcatgtctattctctcctcatctaggctctttttacgctttccaataatatgctcgtcatttattgcgaaagctttctagtagtatatcaaactttcgaaggaatggggaagcctttttcgccatcttccatcatcaggataaacatcagttttcttcgcggaatttcttcataaaggcagccagcttttcgcagtcttcaactgatacggcattgtaaatcgaagcgcggcagccaccgaccgaacggtgtccgccaagccctgacattttttcttcctttgcctttgcgatgaatgatgctgtcagctcatcatttttgagcgtaaaggtgacgttcatgtttgagcggctgtcttctctcgcatggccgcggtagaatccgccgctttcgtcgatcgtattgtataaaattccggccttttcgcggttgcgtttctcaatggcatcgaggcctcctttttccttgagccactccagcacgagagacagcatataaatcgcaaatgtcggaggggtattgtagagcgaatccgctttggcatgtgttgagtacttcagaattttggcaacttgctcattttccttgccgagccagtcttttttcatgatgacaacggtcacccctgacggtccgaggtttttctgagcgccggcatagatgatgtcaaattgggaaacatcgatttttctgcttaaaatatcgctggacatgtccgcgacaaccggaatcggagcgtcggggaacttttgccactgcgttccaaagatcgtattgttggaagtcaggtgaaggtaggccccgtctgccggaatctccggtacttcaggaatatagctgtacgtatcttctttgctggacgcgatgatcgatgtgtttccgaagagctttgcttcggccagcgctttttcagaccaagcgcctgtcataatgaagtgggccgttttgtctttggagagaaagttcatcggaatcattgaaaactgaaggcttgctccgccttgcagaaacatgacttcataatcatcaggtatgtccatcagttcttttaacagagctttcgctttttgatgaacggcgtcatactctttgctgcgatgggacagctccatcacggacatccccgcaccattgaaatcaagaaattcgtcttttgccttctgaagcacttctaaaggcagtgctgctggtcctgcgttaaagttcgttgtacgtatcatcacaatcgctccctgttcgtgtataaaaatataaaacaatcctatcataaaaggttccggttatacataaaaaatttgaattgtgtgaaatatagagcaatggctatttagccgtgccgggcgatctgataaatgtggagtttttttgaacgaaaaaagggcgccggcagctgccgacgcccttggacaacgtctcgattacaggtgtttgttgatggaagctgcaatgttctgcaagtcttccggtgaatagtcatccgcatgggttttccagacggctccgaatccgtctcctttgccgtagcggggaataatgtgcatgtgataatggaagacggactgtcccgctttttcgccattgttattcagaaggttcaagccgatcggctcgtattcgtctttgatggcttgcgcgattttcggaaccgcttcaaaaaactctcgtgaaacttcaggtgtcatttcgtaaatattggttttatgaacttttggaatcacaagcgtgtgtccttttgtgacttggctgatgtcgagaaaagccagcacatgttcattttcaaatacctttgcacaagggatttccccgtttatgattttgcagaaaatacagtcgctcatacttttcctcctttttccattagggaaaggttatgtataagcaacatattaccacaatttgcgcagaaacacgaaaaacaggatgaacggctccaacgttcaccctgcctgaagaaggttacgctttaatgaagaaacgttaactgccttttgcaagcaccccatttttcgtcaaaatgaagacttgtaacgcctatacatttcctgcgacaaacacctcatttgatcgtcacaccttttttatatgacgaagacgtcaaataaagcaggtgctttctcaattcagtggatgaaagaaatttctaagcttgacatgtttcatactcaggactcttgccggattttgtctttgacaaacacctcattcgccagagttgataagctttcccttcttcaagaattagaatgtcctaaggcgctttcgattattcgttttatttttacggccgaaaagcgggagggaaaacgtttcaaatacattcttgtttttggtactattaagaaaaatgcaggaaaggaacgaacgtatgtcactactgactgttaaagagttaactggagggtatacaagaaacccggtgctgcgcgatgtttcatttgcgattgaacgggagcagatcgtcgggctgatcggtttgaacggagcggggaaaagcacgacgatccggcatatcatcggcttaatggaaccgcacaaaggatctgttgaattgaacggcaaaacgttcatggacgatccggaaagctaccgttcccaatttacgtttattccggaaacgccgattttatatgaagagctgacattgaaggagcatttggagctgactgcgatggcgtacgggctttcgaaggaaacgttcgagaaaaggctgccgccgcttttgaaggaattcagaatggagaagcgtctgaaatggttcccggcccatttttcaaaaggaatgaagcagaaggttatgatcatgtgcgctttccttgtcgaacctgacctgtacattatagacgaaccgtttctcggtcttgatccgctggcgatcaatgcccttctcgagcggatgaatgaagcgaagaaaaacggctcggccgttttgatgtcgacgcatattttggcaacggcagagcgatattgcgactccttcatcattctccataacggcgaagtgcgggcgaaaggaacgcttgaagagctcagagaacagttttcgatggaagaagcgagcctcgatgacctgtatcttgaactgacgaaggaagagagctatgaatagcattctggggatttggaagacaagaattgaggagtatgtcaaagaaacaagatcatatttgaaatacatgctgaatgaccaccttgtcatcgtcatgatttttttcctcgctggagctgcgagctggtacagcaaatggctgaaagagatgcccgaaggttttccagcctattgggtgatggccgtcatcttttcgctcattttgacaggctcgtacgtccgcacgctgattaaagaagctgaccttgtctttttgctgccgcttgaagcaaagatggggccgtattttcagcaggctttccggtttagttttttgacgcagctgtttcctctggccgccgcggccctcgctttggcgccgctgtattttgaagcaagcggcaaggggttttccgcgtacctcgtcttgctgattcaactgctcgtcttaaaaggatggaacacggctatgcaatggcggatgacgtttttcggcgaaaaaaacatgagggttaccgaccggtttgtcagactgcttctcaacacgatcgggatctatttcgctttagagtcttcatacgcatttgccgcagctgtctacctgatcatggccgcactgtatgtgtattttaaggtgatcgataagaaaaaatcgtttaaatgggaactgcatattgaagacgaaatcagaagaaagcagcggttctacagaattgcgaacttattcacggacgttccccaccttagaaaacaggcgaaaagaagagcatatctcgattggatgctccggtttattccgtatgaacagagccggacatttacatatatgtacggaagggcatttatcagatcaaacgactatttcggcatcgtcgtcaggctgaccgtgatttttggcatcatcatcgcttatttttcggcatatgagtgggtatcggccgcgctcatcgtcttcaccgtattcattacaggaattcagctgacgccgctgtttgatcatttttcacacctgccactgcaggagctttatcccgtcaaagcagaagaaaaacggaagagctttttcggcctgcttcacatcgttctgagcgtccaggcgcttgttttgtctgccgctgccggagccatgatgcagtggaccgggatgctcgccggactggccggatccgcgctgcttatatttgtgattttgaagccttatttcagcagcagattgaagaaaagtgccaagagatagatgaatccttttctttttccgcaagtatgatgaaagaagaggtgagtggcgcatgaatgaaaaccagctatatttggaggaagcgacccgctggaaaatgaagtttctcagaaagccgtcgatggctgagcggatgtcgaaaggggtacagtcgaaaattaacgcccgcattcccgccaaagttcacaaggcgatgacagaaagcattaaaaagatggtcgaggctactttgctcggctcaaatttaacgacttttgacaagaaaacaggcacgctttcgctaagggaaaaagatgagctggctcagaagacaatcgctcaatatcaaaaggcggctgctgttgaagggatcggaacaggcgcgggcgggatttttctcggactggcggactttccgctcttgctcggcattaaaatgaaatgcctgtttgaattggcgtcgatttacggatacgatattaaggagaaagaagaacggatgtttcttctgtatatttttcagctcgccttttccggagaagcgcaccgaaaagaaattttccgcatgatcgaacattgggataccgaaaagcgcgaaatcgattggcaggcttttcagcaggagtaccgggactatctcgatcttgtaaagctgcttcagcttgtgcccggcttcggcgcggtcgtaggcggaacggctaactataagctgcttgggcaccttggggaaacagcgaggcacgttttccatctgagattgattcatgagacagccggatattgatgatccggctgttttttatgctatttcggttgttccattgcaggcgtttcgcggaccgcctgctctttctcctgataggagaccgcggcatttgccagcactttggctgcgatcagcatcgctttttcatcgatatcaaacttcggatggtgatggggaaacaccgcctccggatcttcaggacgggcgcctgtgaagaaaaatgtccctttgacgtgctgcaagtagtaagcgaaatcttccccgcccatttgcatgccgctttcttcaactttttcaacgccttccgtctgtttggcgatttttgcgagaaaagacgtttcttccgggtggttgcagacaggcggatagcccctttcgaaggaatagtcgcagtcagcgccatgcatgccgcatataccttttgcaacctgttcaatttcgttttcaatcaaggtgcggatttcttcattgaaggaacgcgccgttccgattaaaacggctttatcagcgattacattaaaggagttgtcggcaacaaatgaacctgtcgaaatgacagccggctgagtcggatcaagcctgcggctgacaatctgctggagggaagtgacgatctgcgatccgatcagcacggcgtcttttgttttatgaggctgtgcgccatgcccccctttgcctttaatcgtaatcgtaaaacggtctgcagcggccatgatcggtcctatccggtattgaactgttcccgtcggctctgtagcccacaaatgggtcccgaaaatcacgtcaaccccgtcaaggcagccgtcttcaatcatcggcctggctccgcccggcgaatattcctcggcatgctgatgaatgaagacgatctttccttttaaacggtccgcgtgctcattcaaaactttagcgaggacaagcagggttgccgtgtgcccgtcgtgtccgcaggcatgcatgactcccggcacagtcgatcggtaaggcgcgtctttttcatcatgaatgggcagcgcgtcaaaatcggctcgaagcgcaatgacggggccgggagatccgccttcgatgtaggcgagaactccgcctccgcctatgttggtgcggataggaataccgagcgcttcatagtaagaggcgataaatgcggctgttttcttttcttgaaaagaaagctccgggtgctgatgaaaatggcgcctcaatttgaccatttcatcgtagtgggcatcaagctggttattgatttgtcggacaaatccggatgcgctcaaaaaaattcctccttttaggaatggtaagtttttataattttatgacaattggagccgctgttcaaccttgctgtcccgtatttatagaagaaaaatggcggcaatcgttgtgacggttaatccggcagctacaggaataaagttttttctggcaagatcgaacgggtcaactttgcaaatcgctgcaactggaatgagcgcccatggcacaagcgtaccgccgccgacccaaatggctgagatttggccgagcgcagtcagaacggctggattgctgtcaaccgccgcagcaaacatcgaagcggctgatcctgcgagagaaatccccgaaaatccggatccgtcaagaccggtcaccgctcctgtgacagtgagcgcaacagcggcgatttccggagagagcggaacgctgtgggcaaaggccgagccgaggtcctgcacgatcctattagaaaaaccgggaatctctgctgtcagtactttttcaaaacccgcatcgcccaagtaaaaaaaggcggcgattggaatgacgggggcaaacactttaaagccaaactgaaatccgctaatgaaatagccggtgattttctcaagacgccggtgtttgtggacgataaaatgaatgagaatcatgacgaagactgccgttcctccgacaagcgccgtcgcttcgtccccctgcagttccaatatcagcatcgcggcgatatcccctaaaaaaatgaccggaatcaacagcgcgagccattttctggaggtctggggaggaagccactcaggctcgctttgcagctgcttactggccgctgctctattgcctttctctttccggagcatcaaaaaggctgcccccgttgtcgaaaagcccatgatcaagacgagcggaacgcttgcagacatcacttccgcaacgggcagcccggctgcatctccggtcaatttaggcgctgcctggatgatgtaatcgcctgataaagcgaaaccgtggccgaataaattcatggcgcacgctaccgccatcggggagaggccggctttcagcgcggcgggcaggaggacggcgccgaccaatgcgacagccggggagggccaaaaaaatgaagaaatgataaacattaaagctccggtgatccagtaggccaagacagggcctttcatccatttggcgatcggagtgaccattgcttcattgacgccggtctttgccagcagctcactcatcgaaacggtaaagcagatgatgaaaatagtcggaagaagttccccggcggcgtagattaagctgttaaacatgcccatcacagacgccatgactgaatgggtcgcggctaatgagatgaaaaaaatcccgacaagcgatataaaggtggtatcaagacgaagtagcataaatgcgagaatagctgcaataaagcccaaatataaaaagtgaacggacgttaattcaatttccattttccgatcccccctttaaacataacctcatacagcgtattcctgggctgtcagagtgtgaaggaagggctcatttcctcggaaataaaaaaactgcctaaaaggcagttattcgacagaatgatacgaagaaatataggatgggcgggaaaaaatcgttccgccttggttgattcctgcggaagattccttcttttggtgggcttcgctgaacgacttggagtttttccagtcttgaaatgactgttctctgtcccacagtgtcaatacgatatacgtatcgctgtctttcggcctcagcaccctgagggctttaaagccgggctgattttcgatttttccggctctgtttttaaaacgggcttcgaaaagcggccttccttccggtgtgacagggatgttgttgaggacggtgaatccggaatgttccaaagatcccgactgatcgatgatttcgtagcggtgaggagaatgaaagacgctttctccgtcggtttcgtgaaagagaatggcggaatcgtggcttttcataaataacatgttttcaagaccgtgctgtttggcgagcttttttaaaaaatcgacagttccgtatgtaatgtaaaaattcaattttatcaccccttttttgatagtataacaaaaggacgatttaaaattctatccattacccgctataaatgctgcaacataatttgaagaaaaaattcccatactagctatagaaaggaatgaggtgaccatatgagaaagagatttttcattccaatcatcattacagcggcgatattccttttatcgttaatcggatatattacgattttgttcctgggggattatgtgattgatgaaaagaaactgattttccatgcttcttctaaaatcgtcgaccataatggagaagaagtcgcaagcctctataccgaaaacagaaggcctgtttcaattgccgaggtgccggacaatgtaaaaaatgcctttatcgcggttgaagacaagcgcttttatgagcaccacggcatcgattttaaatcggttagccgtgcggtctataaagatatattagcaggaggaaaagtggaagggggaagcacgatcacccagcagctcgcaaaaaacacttttttgacaaatgacaaaacgtttttaagaaaaacgaaagaagtcattatcgctatcaatttggagcgggattacagcaaagacaagcttttggaaatgtatttgaaccagctatatttcgggcacggcgtctatggaatccaggcggcggcaaactacttttttaacaaagatgtgaaagacttgacggtcagtgagggagcggtgctggcttccattcctaaagcgccttcaacgtattcgcccattctcaatccggaaaaaagccgggagcggcgcaatgtcattctcggcatgatgaacgagcagggatatatcagctcaaaggaaaccgtcagggcccaaggcagcacattggggctccatgtgaaagaaaaatcaaaaaatccgtggcttgacagctatattgatcttgtcatgaaagaagcggaagacaaatattcgatatcgagcgaacagcttctccaaggcggatacacgatcagtgttccgctcgatgtttcgattcaaaaagcggcctacacgctgatgaagcaggacggctattttcccggcacagacaacaaagctgaagggagcgccgtttttatcgataacaggacaggcggcgtagtagccgctctcgggggacgggaatatgctccaaaaggctataacagggccaccgcccagcgccagccgggttcgacgtttaaaccgcttgccgtatacggccccgctcttgaagaaaagctgttcaagccgtattcgatgctcgaggataaacagctgtcatacggcggctactcgcctaaaaactatgacggccaatacgcgggcaaggtctcgatggtggatgcgctgacatacagcaaaaacgcgcctgctgtatggacgttaaatgagatcggaatcgaaacggtgaagccttatctcagccgtatgggcatgaacgtgccggatgaagggctggcattggggctaggcggtctggaaaaaggggtgtcgccgctcgagcttgccggggcataccggacattcgcaaattcaggacaatacaccgagccgttttttattaaaaaaatcaccgatgaaaacggggatgtcatgttccgccacgaggaaaaatcggaaaaggttttcagcaaacaaacagcgtggaacatgacgcggatgctggaggaggtcgtgaaaagcggaacgggaaaggccggtgatttttccggggagattgcaggaaaaacgggttcgaccacgtataccggaaaagagggcggaactaaagacgcctggtttgcggggtatacgcccgaagtgacgggagctgtctggatgggatacgataaaacggatgagtcccattatttaaaaggcggcagcgcttatccgacaaggctgtttaaagacattttaaaacgcaccaaccataagcctgaacggtttaaggcgcctgaaggggtaaaagatctggacaggccgatacgcctcgaagacctggaaagcgttaaagcagactattcctttacgccgatggggctgattacggtgtcattaaaatggcatgaacaagaggataaaagggttgaataccgaatatatgaaaggaaaaacggaaaagaaacgctgattgatacggttaagggaaaaggaagcttttcaatcccttatgcaaacatcttttccgatgcttcctacaaaattgttccatacaatccgcagacgaaaacagagggaaaagggactgattatgttgaaccgaaagtgtttccttcgggtcattagatacccgaaattcatcaatttcttgaacaataagtctcatgagtataccgttcaataaaaaaacggtatattggaaggagtaattttgcgaacgtatggttgcagcttgaaaggtggatatcatgatgaaaaacgacaaggcttttaatgacacattcttaaaagcatgccgaggagaaaaggccgcccatgtaccggtatggtacatgaggcaggccggaagatcacagcctgagtacagagcgctcaaggaaaagtacggtctgtttgaaattacgcatcagcccgaattgtgcgcttatgtgacaaggctgcccgtcgaacagtacgatgtcgatgcggcgatactttataaagacataatgacaccgcttccaggtattggcgttgacgtcgaaattaaaaacgggatcggccctgtcatcgatcagccgattacatctctcgcagatgttgaaaaactcggcgaactcgatccgcaagagcatattccatatgtgctggagacgatcaggctgttgacggaagaacagctgaacgttccgctgatcggttttacaggggcgccctttacattggccagctatatgatcgaaggcggcccgtccaaaaactacaataaaacaaaagcgtttatgtacagccagcctgctgcatgggatcttttgatgaaaaagctcgggaagatggcggctgtatacgttaaagctcaaatccgcgccggcgccaaagccatccaggtgttcgattcctgggtcggcgcgctgaacgccggtgattactgccgctacatcaaaccgacgatggacgttcttttcaaagagttgaaaaaagaagacgtgccgctgattatgttcggggtcggcgcaagccacctcgcgactgaatggcacgatcttgacctcgacgtcgtcgggctggattggcggatgagcgtacaggaagccagggataaagggctgacaaaaacgctccagggaaatttggatccttcgatcctgcttgccccgtgggaagtcatcgaagaaaggacgaaagccattctcgatcagggcatgcagacggaccggtttattttcaacctcggacacgggatctttccagaagtgagtcccgacacactgaaaaaattgacggcatttgttcatgagtattccgcctcaaaaaaatcgagcctgatcacatgagcatttcagttggtcttttcaatataaactgtcaaaatacgtatagatcatgatctttaaagaggtgttcacgttgggtaaaaagaaaatggggcttcttgtcatggcatatgggacgccgtacaaagaggaagacattgaacgttattatacacatatcagaagaggcagaaagcctgagcctgacatgcttcaggacttaaaagaccgctataaggcgatcggaggaatttctccgcttgcaaagatcacgcaggagcagacgaagcagctggaaaaacgcttaaacgagcttcaggatgatgtggtgttcaaggcatatatcggtctcaaacatatcgaacctttcattgaggatgccgttcgggagatgcataaagacgggattacagaagccgtcagcatcgtgctcgcgccccatttctccacctttagcgtacagtcgtacaacaagcgggcgaaagacgaggctgaaaagctcggcgaattgtcgatcacatcgatcaacagctggtatgatgagccgaaatttatcgcttattgggcggatcaggtgagaaaaatctatgacgaaatgccttcggaagagagggaaaacgccgtcttgattgtatcggcgcacagccttcccgaaaaaatcgtcgaaatgggtgatccgtatcctgaacagcttaaagaatcagcgaagctgattgccgaagcggcgggagtaaaagattacgccgtcggctggcaaagcgaaggaaacacccctgatccgtggctgggaccggatgttcaggatttgacgcgcgacttgtcagagcaaaaagggtacagcgcttttgtttatgctcccgtcggctttgtagccgaccatttggaagtcctttatgacaatgactatgagtgcaaagtcgtcacggacgatatcggagcaagctattacagacctgaaatgcctaacgctaaacatgagtttatcgatgctttagcggatgttgtattaaaacaattggagaaagaacagtaaagaaggcgattgtaaatgagtggagaacgcaggcagattgtcatcatcggcggcggtattaccgggttggccgccgccttctacttggagaaggaaatcaaaaagaatgatctcccggccgaagtcacgcttgttgaagcaagcccgagactgggcggaaagatgcagacggtacacaaagacggctatgtgattgaacggggtccggattcatttttggaacggaaacaaagcgcacctcagctcgtgaaggatctcggactggagcatttgcttgtgaacaatgcgactggccagtcttatgtgcttgtcagcgaaacgctctatccgattccggaaggagccgtgatgggggtgccgacaaaaatcggtccttttctgacaaccggcttgttttccttgccggggaagttgagagccggaatggatttggtgcttccagcaagcaagccgcaggaagaccaatcgctcggagaatttttcagaaggcgcgtcggcggtgaagtggtggagaacctgatcgaaccgcttttgtcaggcatttatgccggggacatcgaccgtctcagtctgatgtcgactttcccgcagttctatcagacagagcagaagtacagaagcttgatcatcgggatgaaaaaatcgcgcggcgcccagagcgccggaaagcctgcaaacaaaaagaaaggccagttccagacggtgaaaaccggcctgcagacgatagttgaagaattggaaaagcagctcggcatcacaaaggtttataaaggcacaaaggtcgtcagcattgagcgtgcgggctcggcttacagcatgaagcttgacaacggcaaggtgcttcacgccgattcggccgtggtcaccgctcctcataaagcagctgccgcgatgtttcaaaaagaggattggctgaagggtttagaggatatggtgtcaacatctgtcgccaatgtggcgctcggatttccggaagaagccgtccaaatggagcatcaaggcacgggctttgtcatttcaagaaacagcgatttttccattacggcgtgtacctggacaaacaaaaaatggccgagcacaacgcctgaaggaaaagtcctgctaagggcttatgtagggaaagccggcgatgagtccgttgtcgaacagtctgataacgaaatggtgaaaatcgtcctcgacgatttaaaacggattatgaagatcgacggcgaaccggaaatgacctgcatcacaagatggcatgaagcgatgccgcaataccatgtcggccataagaaaagaattaaagaaatcagggaaggcttggaagcgtcctatccgggtgttttcattacgggggcctcatttgaaggggtcggcatccctgattgcatcgaccaaggcaagcaggccgtcgccgatgtactctcgcaccttttcgaataaagaagagcaaaaaaagctgaccgaaaccattcggcggctttttttattttcactctttttacagctttcatcattttaaagtttgtttatggaaaagataacatttaatctttgcattttacatttatatgtgttacattactttttgtacttactgaccaaaatgttcaaatagtcaattccggggtgagaaaccgtgagcaaagatcgaaaagcactgattttagaagcggcgacaaaatcgtttacacaattcggctacaaagcgacgacgatggatctggtggcgaagcttgccaatgtcggcaagggtacgatctatacctttttcaagaataaagaggaactgttcgatgacattttttcttcgcttctgattgaaatgaagcaaacggctgatcaagcgattgaccctgatctgccttttcacgaaaatgcccatcgcgcgatgatggcgatattggagtacagaaagaggcaccagctgaccattaagatctttcaggaaggcgcggagctcggcacaccggcggcccgcgaggtgattgaaaagctggaacgcatggtcatcggctatattaagagaaaaattaaagaagcaattaaaaatgacgatattagaccgtgtgacccagagctgaacgcgtttgtcatcttcaagctttacatcgcgctcatctttgactgggaaaaaaaccatgaaccgctgaaagatgaagagttggcagagatgctgaaaatgtatattttaaaaggattatctcgttagattatcctttctttgtttaaaggggtgcttagtcgcgtaaggagagcggctactaactaggaggcgtatcaacatgaatgttttcaaaaaccagtggagagaactgataaccaataaaaaactactgatatccgtgatcggggttctctttataccgctgatttacagcagcatatttttggcggcttactgggacccatacggaaacgtcgatcagctccctgtggcggttgtgaattccgacaaggggacgacatatgaaggaaaagaccttcatatcggcgacgaccttgtcaaagaactgaaagaaaacgataaattcgactggcattttacgacgaaggaaaaagcaatgagaggcttgcaaaatgaggaatactacatggttgtagaaatccctgaaaacttttcgaaggatgccagcacggttatggataaacatccgaaaaagctgaatctgatttatcatacaaacgccggacgaaactatgtcggcgcccagatcagcgataaagcgattgaacagcttcagcattcagtcggctctgaaatcacggagcaatatgctgaagtcatctttgacaatttcggcaaaattgcaaaaggtctcggtgaagcaagcgaaggagccggaaagctggataaaggactgaaagatgcgaaagaaggaagcgaaaagctgaaaaagaaccttgaaaagctcgcgaaaagccaaattcagttcaacaaagacggaatggagaagttcggcgcggcattcaatacgctgaacgacaaaattcatgagcttgattccgggcttgcacaatttttggaaaaaagcggccagctgcacagcggtgctcaacagctccaacaaggcatgcctcagattgtggcgggattggagcagatgaatgaaaaagcgcagaagataagcaaactcgaagaagcgatttcaaatgaaaaaattcagcagctcgaaacggcgctttcaaatgccgaaaaagcgaaaaaagaaatcagccagatttcgaaaaatattgatgagcttgaagcggcattgaaaaaccagcacagcgaagtcaaacaaattattgaatccagcaacatgctgacacaagaacagaaagccgcgcttatgaaacaagtcgatgaaaaaatgggaacggtgaaactccctgagtttgacaagttgaaagcgcaaattcccgatgtcagcgaacttcccgatttatccgggctgaaacagaagcttgaggaattgaagcgagtcccttcggatgtgaataaactttataaaggatcgcagaagattcagcaagggcttgatgcgctgacaaacggtttgggtgcttacaacgaaaaattcgcagaagcgaaaagcggatcatccaaaatcgccgaaggcagccagacgttagtcggaaagttcggcgatctgcaaagcgcggccgataaactgaaagacggttcttccaaacttgcagaaggggctaaatcccttgatgaaggtcttggcaagctgtctgacggaagcggggagctgtttgataagctgtctgacgctgccgatcaaaccggcgatattcaagcgggagacgaaaactacaatatgttctcagaccccgttgatgtgaaaggcgataaaatcgatccggtttccaactacggaacaggattaaccccgtatatcttgtcgctcggcttattcgtcggcgcattgatgattaccgttgtcttcgatgtgaaagagccggctgtccggcccgaatcagcctttggctggtttatgagcaaattcagcgtgctttttgcagtgggaattcttcaagcggcgattgcatgcacgatcattctctggggcatcgggcttgaagtgcaaagcgtctggagattctatctgttcagtataatcatgagcattacatgtcttgcgatcattcagtttttggctgcgacaatgggaaatccgggacgattcattgccgtcattctgctcgtgcttcagcttggaggaagcggaggaacatttcctcttgcacttgtccctaagttcttccaggtcatccattctgcactgccgatgacctacagcattgccggatacagagcggtgatttcaagcggagactacgcgtatatgtgggaacaggctgccgtgctcggcggtgttgcgatcgtcatgatggctctgacgctgatttattttaaagtgctgctgaaaaaaggaaaaattgaagagcagcatgcataaaagaaaaacatcttttcaagcccggcaagggcaagaaaagatgttttttttgatattaggaagctggcgcgccccattttacaatcaggcccgtatatgtaagacccccgccaaaaccgaacagaatcaaggtgtcgccttttttcagctttccgtttttgacggcttcatcaagggcgagaacgattgatgcggatgaggtgttgccaaaccattcgacgcttgtcagcgctttttcggctggaatttcggttttttcgcaaatcgattcgatcattcgcagattcgcgctgtgcgggacgaaccaatcgatatctttcagctccatttcagcttgggcaagcagttttttgacgccttcaggaacggacctgaccgcccatttatacacttcgcggccgttttgaaccatttttccttcacctgagagcggctcccctttaaggtcgctgcgcaagccggttctgtataaatggcgggctccgtcacctttcgtatcctgggtaaaagtaataaagcttggggaattgtcgtcccgttcgacaagcagggcgcccgcgccgtcgccgaacaaaatgcaagacgcgcggtctgtgtagtcggttgttttggataaggtttcaccgctgatcacaagaatttttttatgcagtccggaagtgatcaggccgttggcgatatgcaatccgtatgttaatcccgcgcaagtcgcatttacatccaccgcgccgacttctttccatccgaagtgctcctgaacctggcatgccgtgcttggaaaagcatagtccgccgttgtggtagagacgatgatcatgtcaatatcgtcaagcgtgccgctgtatctgttttttagatcttcaaccgcctttatgcaaagatctgatgtgaattcgtgactcccggcgattcgcctttctttcattcctgtccgctgaatgatccattcatcagaagtatcaacgatcttttcaaactctttgtttgtcatgcgcttttcgggaacataggtgccgatggcggaaattcgcgcttttgataaagttttcatgaaattcactctcctttttcttattatatcacctagtattagtatctggtactaaaatgttgatatgaggtatactataaccattacaagttgggaggaatgaaccatgtcaggacagaaaacgatggagctcatcaaggagctcgtctccatcccgagccctaccggaaatacgtatgacattatagactatatcaaccgccttttagagaaagaaggagttgaaacaaggcataaccgtaaaggcggcctgatcgcgacgataccgggctctgacaaatcccggcacaggatgctgaccgctcatgtcgataccctcggagctatggtgaaagagattaaaccgaacggaaggctgaaaattgatttaatcgggggcttcaattacaactcgattgaaggcgagtattgcaacattgaaacagcatctgggaaaacttacaccggcaccatcttaatgcatcagacatcagtgcatgtatacaaagacgccggaaaagccgagcggaaccagaaaaatatggaggtccgcattgacgaaccggtcaatagtgaagaagaaacccgggcgctcggcatcaatgtcggcgattttatctccttcgatccgcgcgttgaaatcacgccgagcgggtttatcaaatcgcgtcatctcgacgataaagcaagcgtcgccctcctcatcgagctgatcagaaccatcaacacagaagggatgacactgccttatacgacgcactttttaatttccaacaatgaagaaatcggttatggcggcaactccaacatcccgcctgaaacggtggaatatttggctgttgatatgggagcgatcggcgatggacagtcaacagatgaatatacggtatccatttgtgtaaaggatgccagcggcccatatcactacgggcttcgaaagcgcctgacagccctttgtgaagcacatggaatcgattataagcttgatatttacccatactacggttcagatgcttcagcggccgtcaaagcgggccatgatatcgtccacgggctgatcggcccgggaattgacgcatcccatgcgtttgaaaggacgcatcaatcgtccttggagcagacggcaaagctgctgtatcactatgttcagtctgacatggcataaaaaagctcccaaaggaccccggtcccttgggagtaaaaaaagagtggaagtcatccatccgtaaaggatggcgtttacttaccagtaatcatagtgttttttctttttgcagtgatcaaagtggtcaaacttcttgtagtcatagtcataatcatacttcttaaagcatggataatagtagtaataatagtagtagtagtatttcttgcagtcatggtctttcttgtggtaatcatagtcataatctttcttgcaatggtcatggtaaaaatacattaaacttccctccaattttcttttctaatttaactacagtacatcgtatgtaaacaaaaggaagttgtttggacaggttgcttgagaaattcgtatatttttttaaaaaaacgtatgtcttcccgggatggaaaacatacgttttttgatagaaaagggggtcagccggatacttctatatctgccggctcccgttgatttaagacgttctgccctttaacggcgtcatattcaccttcccattttgacatgaccacagcggcgagagcgtttccggtcaagttgacgaccgttctcgccatgtccataatccggtcgactccggcaatgaaggccagcccttcagcaggaacgccgatcgtgcccaaagtcgcaagaagaacgacgaaagatgtgccgggaacggcagccatacctttagaagtgaccatcagaacaaggattaacgtgagctgctgtccaatggatagatcgatgccgtagacctgcgccagaaacagcgccgcgatcgcttgatacaggacagagccgtcaaggttaaatgtatagccgatcggaatgacaaacgacacgatgcctttcggacagccgattttctccatcttttccatgacgcgcggaagcacggtttcagagcttgatgtactgtacgcaagaagaagctcatctttcaaaaaagccaaaaatttaaatatattgataccgcaaagcttgccgacgatcccaaagataacgatcaagaagaaagcaagagccaggtagacaagtaaaacgagctttcccaatgataaaagcgaagaaaaaccaaattttgaaaccgtcacgccaattaaagcaaaaacgccgaacggcgcgaatttcataacgatgttgacgacgtggaacatggcttgagacgttgcctcgaaaaaggagagcacaggcttgcctttttcgcctatggcagacaccccgagtgcgaacagaacagtgaagcaaatgatcgcaagcagatcgccttcagcgagcgactggaaaaagtttgtcggcacaatgtgcaggaacgtgtctgcgacagatttggtgcttgcttctttttctgtttctacatattggctgatatcctgtttttcagcaccagaaaagtttacgccgtgcccaggctgaatgatgtttccgaggagaagtccgagcacaatcgcaaaagtcgtaatgatttcaaagtaaaggatcgtccgaaagccgagcctgccgacctttttgccgctgccggcccccgcaaccccgacaatcaagcttgaaacgacaataggaatcacaatcattttgattaatcttaagaacaaatcgccgacgggctgcagatacgttgcaaccgcaggatttccgaaccaaatcgctcctgctgcaacacctaaaatcagcccgaggaaaatttgtgtggctaatccgaatttaagtcttttcatagatgccctcccaacgcatacttaattttatactagaatattaaactgagatcgtaaattaagtatagcgaaagaaaaagcagctcgtccataaaaaaaataacgtctgaatatattgaaaattcgaatatgagatgattatcccagcttaaattcaaatcgggacaatcatcggtgtatattttcctaagtgaaatagtaaaatgttattaaaataatgaattttgacaagaatctctctctttataactaactttatgacaaaaaaaagccccggggaatccgccggggcctttctagtgaagtctatatatcttttacttttaagcatttagagcaggtgtttccgtagcattcgtgctgctcatcaatatcgtggccgcacactgaacattttttggaaggcaaatttctgaagaactcggtgattttagcgagcatgttgattcccccaattcgtttgttgcaatcattgtattataacagagaccggaaaatcaatgtctgttttatgacaaaatataaaacatgcaatttttaagaaaaatgggtatattgaatagggggacgatagacacgaaaaagaggtgtgtatacatgaaggtgacagtcatcggctgctgcggaggatttccggctgcaaatgaagcgacttcaggctatctctttcaatccggggactattccgttttaatcgactgcggcagtgccgttttatccaaacttcagctgtttctgcccgttgaggagctagatgccgttatattatcccattatcatcatgaccatattgcggatgtcggccctttgcaatttgccaaactggtcggctcattcctcggcaagggagcggatgcccttccgatatatggacatccttttgatgaagagcagttttcaaagcttacatataaaacgcataccgctggattggcgtatgatccgacacagcctttggctatcggaccgtttacgttcacgtttttaaaaacggttcaccctgttgactgctttgccatgagggtgacggacggtgttcattctgtcgtttatacggccgactcgagctttcaggaagcctttattccgttcagcgaaggagccgatctcttgatctcagagtgcaacttttatgcggatcaggatgggaggagcgccggtcatatgaacagtcttgaagcggggcggatcgctgcggaagcgggtgccgggcagcttctcttgacacacctcccgcatttcggggaacaccaaaaactgatagaagaggcccaaaccgtttataaaggtgcggttgttctggcgcacaccggttatgtgtggggagaatagaaggaggaactgacaaacatgctgtttatcgataatcaaaatattacagatccgaggatcaacttggcgattgaggagtactgcttaaagcatctcgatcctgaagagacgtatctgctgttttatatcaaccagccgtcgatcatcatcggcaaaaatcaaaatacgatcgaggaaatcaacacaaaatatgtagatgaaaacgggatcattgtcgtccgcaggctgtcaggcggcggagctgtctaccatgatctcgggaacttgaacttcagttttattacgaaggacgacggcaacagcttccacaacttcaagaagtttactgagcccgttgtggccgctttaaaacggcttggcgtcgatgcggagctgagcggccgaaacgatttgatggcaaacggccggaaaatctcgggaaacgcccagttttcaacgaaaggaagaatgttcagccacggcacgctgttgttcgattctgagattgaacatgtcgtatcggctttaaaagtgaaaaaagataaaatcgaatcaaaaggcattaaatcgatcaggagccgtgtggccaatattagcgagtttctcgatcagaagatgacgacagtggaattccgaagcatgcttctccgctatatttttgataccgaaggggaaataccggagtataagctgactgaaaaagactggaaaatcattaatcaaatttcaaaggaacgctatcaaaactgggattggaactatgggaagtctccgaaattcaatctgcagcattctaaacgatttcaagctggatcggtcgacatccgcctcgaagtgcaaaaaggcgtgatccgcgagtgcaaaatattcggtgactttttcggagtcggagatgtcagcgacatcgaagagaagctgacaggcgtgcagtatgaaagaaaagcgattgaagaagctcttcaaggcgtggacattaagcattacttcggcaatattcaaaaagaagaatttttggatcttgtctactaatagagaggctgcggtttccgcggccccttttttaacatgagaggaatggaagatatttcccggcagcccttgagtgttttctgttcatttactataatgggaatagattttgattatcacaaaatgaatggtcattcattcattttttaaaggggtgggagaatgaatttagtttcaaaattaggggaaacagctcaatcaaagcctgacagaaccgcttatatttttggagagcaaacggaaacatacgggggattgcagcagaaaattgattgctttgccgaagggctgcgcgaaatcggggtggaaaagggagatcatgtcgctttgctactcggcaatacaccgcattttgtgattgcgttttacggcgcgctgaaggccggggctgtcgtcataccgatcaatccggcctatacgccgactgagatcggctatatgctgacaaatggcgatgcaaaagtgatcgtggctctgggacagctgcttccgctttacgaaaaggtgcatgaatcccttccgaaagtcggctgcgtcgtgctttgcgaaactggagagccgcttcaggaaccggaaaacacagaggttaagatgaaattgaaatcgtttacaagcattatgaaacctcctgtccggccgtttcctgaaatcgatgacgaagatacggccgccatcctctatacgtcaggcaccacgggaagaccaaaaggggcgatgctcacacatcaaaatctattttcgaatgcaaatgatacagcccgctatctgacaatgaatgaatctgaccttgtcgtcgccgccctgccgatgttccacgttttttgtttaacggtctgcatgaatgcaccgctcatgaacggcgcagcgattttgatcgtgccgaaattcagtcccgccgaggttttcaagctgattaaaaagcatcaggcgacgatcttctcaggcgttccgacaatgtacaattacctgtaccagtatgaaggagcggatgaaacaggctttcggtccatcaggctttgcatctcaggcggagcggccatgcctgtcgctctcctgaaaagctttgaagaaaggttcggcgtcctcgttttagaaggctacggcttgtcggaggcttctcctgttacatgctttaacccgttcagcaccggccgcaagccaggatcgatcggcacgaacattctcaatgtgaaaaacaaagtcgtcaatgaactcggggaagagctgcctgccggccaagtcggcgagctgatcgttaaagggcctaatgtcatgaaagggtactacaaaatgccggatgagacggcccatacgataaaagacggatggctgtatacaggtgatttggcaaaacgggatgaagacggttatttttatatcgtcgacagaaaaaaagatatgattatcgtcggcggctataatgtctatccgagggaaatcgaagaggtgctctacctccatccaaaaatcgcagaagcggtggtgatcggagtgcccgatccgaatacgggagaagccgttcattgctatgtcgttccgaaggataaaacgctgacagaggaggatgtcttgtcgcactgcaaaaagcatcttgccaaatacaagcgcccgtcggcgatcgttttcatggatgaaattccgaaaaactcgaccggcaaaattttaaggcgcgctttaaaagacattctgacaaacaaatcttgacccgctaaaagggacgcctgccgcgtcccttttttgcaattctcctaggagggcgtctttttccctttgttggagaacgaaatatgtgccttcctcttctttcaggatgacggcttcatctttcttcagccagacggtgaagtgaacgcgatgtgtgccggtcatgctgatgtatccgtgatacgccggagaaggcaggtgatgcgctgtctttttcttcattcttttccctttattaaatgtatcaagcaggacggctatgttgtgcctgtctttgatgctgaccgttttttcactgtctcccgcctgcttcaagatgatttcttctgcatttcttgagtcgaaaggctccgccatcaagtggaatacataaaagacagtgatggataaaatgccgaaaaaaagtgcgatccccattatttttttcagaatgatcaccccaggctatctattttctccctttaaagccttttcatcctgagaaattatgctataatgttcaataaattatacgaatgtttaatttattataagggggcggaagatgaattcgattgaaaaacaagtggcagaaaacattaagaggctgcgaaaaatccgcaattacagccttgatcaattgtcatcgatgaccggcgtcagcaaaggcatgctcgcgcaaattgaaaaaggctcttcaagtccgacaatcacaaccttgtggaagatcgcaaacgggctgcaagtatcatttacttctttggcagaaaggcctgccggggagccgacggtcgtcagaaagcacgagaaaacgcctgttatggccggagaagaaaaatacgcggcatttccgcattttccgttcgaccagaaaaagaagtttgaaatcttttatattgaacttgcgcccggctgtgtgcacgaatcagagcctcaccacggagggattgaagagtacgtgctcgtctctaaaggcgcgcttgcggtgacggcgggtgattacacctgcgacttgaacgagggtgatgcaatgcatttcaccgcaaacaccgttcatacgtacaaaaacaacacggaacaaacggcatcatgctatacactcatttattatccgtaaagaggtgtcaagatggaaaagcaggattcactcaactttctagacgggcttcgttcaggggtttcccttgccgtcggctacatcccggtcgccttgacattcgggcttttggcaaaaacaacggggctgtcgctttttgaaacgtttttgatgagcgcccttgttttcggaggagcgtcccagtatatgtctctgagcatgcttgccgttcagacaggaatcatcgaaatcgtcatgacgacgttcattgtgaacatcagacattttttattttcagcgactttgaatcaattggtagaaaaagattcgccttggaaaaaagcgttttactcatttttcgcggtgacagatgaatcgtttgccgtcgctgctttaagaaaggaaaagctgacgaccgggtacatgatcggcctcggctcgatcggctatgtaagctgggttttttggagtgcggccgggcattttgcaggggccgccatgccggccgttctccaggaaagcatgagcatcgccctttatgccatgtttatcggattgttggtgccgcctttgaaaaaacagcgaaaagtcctgctgctggcgggggcggctgcgctattcaataccgttttccaaatgaacggaatattgtcggcaggatggtcgatcgtctgcgctacgcttttatccgccatcctgatcgaatggctgtaccaatttagaacagaggggaagagaaactatgtttagcccgatcatctggatgattatcggcatggctgccgttacatatgtgccgcggatggtgccgctcattgcttttgaaagcctgaagcttcccggatttttggagcgcgtgctgaaaaatgtgccgtacgccgttttaggagctctcatttttcctggaattttttcggtgcaaagcggtatgctctatggacttgccggcgctcttatcgcatttttattttcctattttggagcaagcgtcatagtcgtcgtgatggggacgattttgacgctcgcaggggccggcctcttgctctcattgtaaggcttggttctaactttcacaggaaaagcttacaatagaagtaactgctatgtgagaggaagtgattcgccatgcggaaatggatcgcgggagccgttctcctgtatgtgctgtacggcctttttttctattggtatctctttatggccggtgaaccctccgttcccgaggcgctgaaagggacaagcgcagacccggcgacatttatgaacgaaagggaactcatgctgacggaagagtactcgaaaataaaggactttctgttttttatccggattccgtttgagtggttcttatttttaatattgttgattgccggtttatcgaagaaaatgaagaattgggcggagcagacgtcaaagcggagaacgattcaaataacggcatatgtttttgctttgtttctgatcgtcacgatcgtttctttgccgcttgactggatcagctatcaatattcgcttgactacggcatatcaacacagacaaccgcgagctggatcaaagaccaggtgatcgacttctggatcagctttccgataacggctgcggcggtgatcgtcttttactttttgatcaaaaagcatgaaaaacgctggtggttttatgcctggtgcctgacggttccggttacgctgtttttatttttccttcagccggttgtcatcgatcctttatacaatgacttttatccgctgaaaaataaagatctcgaacaaagcattctgaagctggccgatcaggcagatattcctgcgaatcacgtctatgaagtgaacatgtctgaaaaaacgaatgcgttaaatgcttatgtgacagggatcggcgccaataaaaggattgtgctctgggataccacgctgaacaagctggatgagccggaaattttattcattatggcgcacgaaatggggcactatgtgatgaagcatgtttacataggactcggcgggtacctgcttttatcccttgccgtcttttatgtgatcgacaagctgtacaagcggatcatcggccgctatggaaaaagcctccgcattgcgggaaaatccgatcttgccgcactcccgcttctcctgatgctgatgggggtcatctctttcgcgtcttctccatttacaaacgcagtttcgaggcatcaggaaaaagccgctgaccagtatgcgattgaactgacgaacaacagcgatgcagcggttgcgacttttcaagagctctcaaaagccgggttgagcgaggcgaacccgccgtttctcgtcaagatttttaaatacggccatccgaccataatggaacggattcaaaatattgaacagtcttcaactgaatgaagaaaaagctagtgctaaaaacactagctttttctatatgccatttgttagaatatgttattgagcggcagcttcgacattgatcagaccttttccatagtagaaggagcttcccaaataagtcgccgtactggagagacggttgcggacttgtgaagctgaaaggttcggatgttttgacaagatcaaagctgctgctcccgctacatgaggagaagccattgacgttccgttcaatgttgcataagtgctggttgggtaagtgctgtacacgcctgcgccaggagccatgacttcaagctctgctccgacgctggaaaatgaagctctgttgctgttagagtctaccgcgccaactgcgatgacagagtcgtatttcgcaggatagccgattgtattcgtgtttcctgaagatccgctgttcccagcagccgccacaacgacaacccctcttgcatatgcattgtcaaccgcctgtttcatcgctgttgagcctgatggtcctccaaggctcatgttgataacatccatgccgtttgtcgtcgcccactcgattccgcttacaatgccgctgtaagatccgcttccgcttgaattcagcactttaaccgcgtacaaggatacgttcggcgcaacgcctaatacacccgttgtattgtcaagcgcagctactgtaccggcaacatgcgtgccgtgtccgttgccgtcggtgttataagcttcgccagctacgaagcttgctccgccgactacgttcaagtccggatgagaagcttggattcctgtatccaggacggcgacttttacgttcgctcccttgtagccttgagcctgcactttgtccgctttaatgagaggaatgccgtaaggaacggtttgcgccaaagcatgagctacgtgatcctcttccacataagcgacatccggatcatttttgacttcctcaagcgcttctttgtctagcttcgcttttgccgcgttgatgattctaaactgcttgtccacttttccgccgctctctttgatgatgtcctttttgacggatgcggttttcactcccgacttaaatccgacaatataatccttttcaacatttttcgccggctgagcagcagacgcggaatcgctgaaggccatcgtgaacacgagcattaaggccgtcagcatcccaagccaaaaactctttttcctcatcattactcactctcctccgttttattcagaataattgaaatagaagaataatatattctattctaattattctgttaatttattatagaaaaaaaatgaattatatggtagacccatttttttgaacggccaatttaaatttattggttattaataactgttttagaaaaatattcggttcgaaagtatgaatagaccgcttcaacctggcagggaaagaggtcccggggtccgtgaatgacaggagattgcttcgtctgattcattttatgaaaatactattcatttattttatgagatcattttttgccgaaggaggttgcggccttgtcgatcatctattaaaatatgcaatatatcgcatacagaaacgggtgaaagatatgaaatcagctcatgtgaaaggcgtattgatggtgcttgcaggggcttcattgtggggattatcgggaagcgctgcacagtacatatttgaaaggggagcggttgaagccggctcgcttgtctctgtcaggcttctggcatcgggcgtcattctcttgctatatgtttcaatgaaaaacggttttcaacatgtgtgtcagatatggaagaaaaaaacagatatttgttcgattttagtattttccatttttggaatgcttgctgttcaatatacgttttttgcttcaatcgaaaagggaaatgccgcggctgctgcaattcttcaatacttggcgccttttttcgtattgttttacctatatgttaaaaaagaacttccgcctaagtggaaagatgccgtacttactttattggcgcttttcggcgtgtttcttcttttgacaggcggaaggccggacagtttgtatattccggccgaggccgccgtttggggcattttgtccggtggagcgcttgctttctatacggtttttgcaggaggattaattcaatcgttcggtgctttgacggttacgggatggggtatgctcgtcggaggggccggaatttcttttttgtttccgccgtttcggtttgacctttcgcacattggggcaggggaggcggcagccattctgtttgttgtattgtgcggcacagctttggcgtttgccctatacatcggcagcctttcttatctttccgcaaaagaaacgagctgcctgagctgcgccgaaccgcttgcggccgttctgtcgtcggcgctctggctgggtgtgcccttcaatgcctttcaaggagccggtacggtgatggtgatcattacggtcatcatcctttccctcagcagagaaagaaaagcagcagattctgtcaatgaaagggtgtagaaaggagagggaggctcctttcttttttaaaatgataatgattatcattgtcattgatggagggagttgctataataagctcgtctactacaaaaaaggagatatatatgaagcacaaatattttgctattttatttttattgatgatatcagtgatgacggcctgctctggaggaagcgagagcacgaaaacttccggtcaggattccgtgacagttaagcatgatcttggagaaacgaaagtgcggaataaaccgaaaaaagttgtggttcttgaattgggatttattgatgcgctccttgatgcgggtattaagcctgtcggaattgcggacgacggcaaacctaagtttattaacgagaaggtcaggggaaaaatcaaagggtatacttcagtcggttcgcgcgcccagccaagctttgaaaaaattgcttctttaaagcccgatttaattattgccgattcgagcaggcacagcggcgtctatgataagctgtcgaaaattgcgccgacaatcgcgctcaaaaacttgaatgccgattatcaggacacgcttgatgcatctcttacgattgcgaaagccgtcggcaaagaaagcgcaatggagaaaaaattggctgaacataaacaaaagctggatgaattgaaacagaaattcggcagccggaaacagagcattcttctgctcgggaacacaaatgaagaaatcaccgtgcgcgatgaaaactttttcacgtctcagcttctgacgaaaatcggctatacatacggtgtcggagacagcggcaaaggcgatgccgaaaacggtgaatccgtcaatattaaaatgacgctcgaacagctgcttgagaaagatcccgacgttattgtcctgatgacgggagaaaaagataaagtcgatgaagacgggaaaagaccgatcgaaaaagatcctctttggaaaaagctcagcgcagtcaaaaacggcaaggtttatgaagccgacagattcgcctggtcgctccgacgcagcattgacggagcagatgagctgatggatgaaatcgatcagcatcttctgtctgaggatcaaaagaaatcttaggagcctgccggcttgttggacgggatgacgcatgcttttgtaaaaaagcatgcgcttgttttttctaaaggagtgacctgttttgatatatatgaaacgttttgcaccgctcatttttgtttttcttttgcttgcgagttttgcgctttctgtttcaatcggttcgtcaatgattgcactgtccgatatttgggcggctgtttttgcgtacgacggttcaaaattgcacgcgattattcagtccatccgaattccgcgcgcattgaccgccgcattaatcggcgcgaatctaggggctgcgggcgcgctgatgcaggcggtgacaagaaatgcgctcgcatctccgagcatcttcggaatcaatgcaggggcctcgcttgctgtcgtatgtttgacggtgatgtttcctgcgcttgcagctccccagacagcgatgggagccgcatttgccggcggtgcagcggccgcgctgatcgtgtacgcggttgcctcagtattcagcgaacatgacagggatatcagctttgccttgattggcgttgtcattcaggcgattcttgcttcgatgacgcaaatgctgcttatctttcatgaagagtcgacggaaacgctattgttttggctttccggttctttagcggggagctcatgggataagcttcatttattggttccggtgagcattgcgggtttgttgacggctttggccttagggagggcggcttccgtcatgagtctcggagatgaagtttctcatgggctgggacaaaaagtatggctcagcagattgctaatcgccttcactgttgtcgcattggcgggagtgtccgtttccgccgccggtccgattggtttcatcggtttgatggttcctcatatgatccggtatctcatcggtgctgactaccgggcggtgattccgtattcggcattgcttggagccgttcttttgctgtttgccgatattttgtcccgctttgtctattttccgtaccaaacgcctgtcggagttgtcacggcaatgattgggacgccgttttttatctatttggcgagaagacggaaaaagggggcggcataatgaacaatccggcaagaaagacgaaaaggcggcgcggacaatcggcggttgttctctgtgcgctattcgcctgtttgtttgtgctcattgtactcaatttggcgatcggcgatgaaaacatcggactgtgggacgtattgaaatcgctggcaggacaaggcgatgcgggagtccgctttttggtgatggaatttcgaatgccgcgaatcctcctcgctgtgcttgccggaggggcgctttcgatcgcgggtgtagtcgctcaatttctgatgaaaaatccgctggccgcccctgacacgcttgggattacaggaggagcgggattgggcgctgtgatcgttacggtcttgttttcacagcaaagtccgcttctgctgacaggcgccgccttttcaggaagcgttttagctgcgatcctcgtctatttattggcttatcgaaatgggatctctcctgtgcggctggctcttgtcgggatagcggtcaatgctttctgccattcgggcattcagctgttaatctcaagggggagcccgaatgtcaacagcgcattaatttggctgaacggaagtctgtggggaagaggctggcaggatgtattgcctcttttcatatggtgctgtctggtgattcctccgatatggcttgcggcaaaaccgctcgatatcatcaaatcaggggacgggattgccgtcggcctcggcatccggcttgaaagaacaaggtttctgctgcttgccggtgcggttttgctgacagctgctgctgtgaccgctgtgggaacgatcggttttatcgggctgatggcgcctcatatcgcaagaaagctcgcaggggctgaaacgaagatcttgattcccgttgcagctctcgtcggcggcatcgtccttttgatagccgatgccgccggaagaggtcttgttccgccgcttgaaataccggccggattgatcgcagccgttatcggcgggccgtattttatctatttgctgcgccgcgaagaacataaaaaaagacggcatgcttgatgccgtctttttttaatctgacaaatggtgtgaaaggttgtaatccttcacatgccatttattttcatgaaatttgatgttgcttaggcaggcattgacgagcttcgtgttttccaggttgatgtcgccgtttgagatttttgacagaagcgcgtgtatcgcggctccgtgtgcgacgatcagcacttttttgtccggataccgctcactgaccttttgaacgccggccatcagccgttcggcaagcgcttcttttgattcctgattcggatattctttatcaggatagagcctcattctttcttcgaatggcattccttctgcatctccgtaattcctctcgatgaaatcctccatttcgatgatttcaagtccgaggtattgattgatgatttcagcggtttctttcgctcttcttaaagggcttgtaatgatgacgtcccagtcggaccctttcaaaaacgccccggtttcttttgcttgttttttaccggtttcatttaaagggatatctgttcttccctgcagttttcctaaagcattccagtccgtctcgccgtgccggatcaaacaaatcgcagtcatgctaaaagtctcctttcgaacttggggtgcgcattttcggtgatatggccattatactaaatttaaaaaacggaaccacgaaatatgactggcaccgaacaacatttacatgattttttcaaacaggctgtgccgattctgctgttttttcgatcacgtctgcaatcgttgtcgagcgttgccgtgatggctgtgaatatatatctttgcttgcacggcagacttctcaaagtatggatgtgaaaaaatacacaggtcatgattgacctgtgtacggtaacgcctcatttttttgtcagctctacgagagaatcgactgaaactgcgacttgtgatacggcggcattgacatcttgaaggccgcttaaaaacgactgcaggtcgccttcgattcggccgctttgctctttgctcgttttcatattggagacgatatcatcgaataggcgattgatctccgacatcttgtctttgctttcgttcacaagctgatttacatctgtaatatgcttcgtgacgatcgagatttgagcgtttgtgttattgacgagctctgatacggtggagacggtttttttcgtatcatcggacagctttctgacttcgtttgcgacaactgcgaaacctttgccgtgctctcctgcccttgccgattcgatcgaggcgttgagcgaaagcaaattcgtctgttcggcaatgcctgttacgatgccgaatatcttttcgatctgcagcgcgatttcttccagctttttaatttcctgctcgatttgcgtcatgctgcttcccatttgattcagctgctgttcctgttcctcaagctccttttttccgccgatcgatttttgttcgacagaaacggctgtcttcgttccggctcttgacgtttcggcgatctcggaagatttgtcgaccaattcctgtacggcgcccgtcgtttcggcaaatatagcggccaaagaaccggaagtatctttaatttgcctgtgaagttcatttttgctttcttcatcaagtctgcggagcctcgcgtgttcgtcttcaaaggcctccaggacgatctgctgttcgatgttgagaattttggtgacggctttgacagaccgcctgtattcctcatcggataaggcgttttcaaagatcttcagcattgaaagaaggagatcttgaaatgcccccagataccactttggcaacagtccgatgcgaagatgaacgtgggcgatccggattcttttttctaaaaaggcttcgtcgatgacgcctgaaaacatttcctggatgtggatcgtcaatgtctttttgagacggtcgaccgagctgttgtcatggatgatctccatgagagagctttcatgctcaagattttgataaaatcgggtgacgatggtttcaatatgttcagtgactaagggcttcagcctgctcagcacccaaagatcctcatccgtcaaatcgaccattgccagctgttttttaaattctgcgtgctgattgagcctgattctttttgtttggtcagggctttccccagcaaaaaatgatcgttctgtctttctatcctttttgaataacacgatcgtatccccctgtaatcattaatgataaaactgccgtttttttgaaatttccagcatttatctttttatcggcaatttttcattactttttaacttgtacatctcagctttctggatctttaagaggttctacggcagggccctcaatgacatcgccgtcgatcgaaaaccttgagccgtggcacggacagtcccatgtcttttctccatcattccactcgacttcacagcccatatgggtgcatgttgtgtcaaccagatgaagctcgcctttttcatcgcgataagcgcccgcccgtttcccggcatgcgacacgaccgcgccttctccgttgacaaggtcttccggcttcctgatcggctgctcgagttttccttcggcaaagtgttttgcaacatccgcgttgtaggaaatcgcttttttgatgcttggatccgggtggaaacgggccggctgaaagacggcttgataaggattgtcttcacccgcgatatgatctgtcatcagctgcgcggcgagggtgctcgttgtcatgccccatttccgatatccggtggcgacgagaatgcgcttttctttcggatagatcggcccgatatacggaattttgtcaagcgtgattaaatcttgcgctgaccagcggtaagggatcgattcgatgccgagcacgccttccgcaaatgattcaagcgcctgataatgcttgattgtatcttctccctggccggttttgtggctttcaccgccgacaagaaccattttttctccgtcgatcgtcaccgagcgaagcgagcgtgaaggctggtctatacttaagtacatgccgcctggatacggcgttttcggcttgacggcgagcacgtatgaccggctcggctcaagccttgcaaaatagaatccttttttatcatgaaatggaaagtgcgtgcagcacgtgacataatcgctgaagatttgatgtccgcttcttgtcagcacttttggccggtcgccttctttgatttccttagacgccgtgttttcgtatatttttccgccggcttcccggacggcctctgcaaggtatttcaaatagtgcagcggatgaaactgggcctggtttttcatgacgagtcctgcttttacatcaattgggacggggagatctttgatgaattccctgtcaatcccgagcttttggtatgcttcatattcctttctgagtttttggaccgattgttcttcagttgtgtaaatgcacgcgtcctgttcttcaaaatcgcacggtatcttttgctcaagcacgaggtttttgataaaggacagcgccttgagatttgcttcataatacagcctcgcattcggcattccgatatgcccgatcagttcgtcatagatcagatcgtgctgcgcggtgattttggctgtcgtatagccggttgttccgtcgagtatccggccggattcgatcaagacgacgctgtagccttttttcgtcagcaaataagccgtcgtcagtccggtcatgccgccgccgatgatggcgacatctgttttgacatcttcagacagttcctcgaacgaaggaaggtctgtactgtttctccaatacgattcaggcgagtccggcagtttttgttcttgattgctcacaaagttccctccatcatgcatccgttttgttcttaaattttcccaattgagaaatattcatgcatgtgaagcggcttgtcataaaaaaggggcgttttcataaaatagtaaggttgaatcgatgtgaaggaggaatggttttgagcaagcagccgaagaaagtactgcctccccagcaccaaacacagcgtcccggattggagtatttgatggatccccggcccgttttcgaccggccgaaacgagagcgaaaactggctgggaaaaccgcgattattacgggaggagacagcggaatcggccgtgccgtgtccgttttgtttgcgaaggaaggcgcgaacgttgtcatcgtttacttaaatgaacaccgcgatgcagaagaaacaaaggggtatgtggaaaaagaaggcgtcggatgcaagctgattgcaggggacatcggggacgaggctttttgcaacgatgtggtgcgccgggcaaaggaagcattcccaacgatcgatattctcgtcaataatgcggctgaacagcatccgcaaaagggaatcgaaaaaatcacgagccatcagctgatccgaacgtttcagacgaatattttttccatgttttatttgacaaaagctgtgttgccgcatttgaaaaaaggcagctcaatcatcaatacgacctcgattacggcttatgccggcaatgaaaggctgatcgattattcttcgacgaaaggagcgattacatcatttacgcgttcgctcgctttgtcgcttgtcgatcagggcattcgtgtgaacggtgtggcaccggggccgatttggacgccgcttataccgtcgacgtttactgagagagaggtcgaaatattcggttcaacaacgccgatggaacggccgggacagcctgctgaagtggcgccgagctatctgtttctagccagcgacgattcttcctacatgacgggccaggtgctccatgtcaacggcggaacgattattaacggataaaaggccggactatttaaaaagccggcttttttcgcataagaaagccaatcccttgggattggccgttatgcgtgctttttcagcgctgtatattctcttgaaagctcaaggaaagattgcttatctcctttgtctaatgcttcattaatcttcttgctcagcgtgtgcaaacgccgtttaaaaagcgattcatcaaggaccatttgaatgtagatatccgtgatggttacatcaagttctttcaccttttgggtattgcgggacttcatgagctcagcgtacgattttttctctttcataaagattccccctgatgccttttttatagtatatggattacacaataaaaaatcaataagtatttataatttttagaaaattattcggagatgcgtgtttatgagaataaaagtttgtatatttggacaaagaaacacggatttaatcgaacaaaacataaaaatggcattttaaaaacatattttcaaattaattggaaaaaatcctgtcgttttgtaaaggataatgttagattaatagtataaatttactaacgattaggaggatcaaaatgagcacagaggatatgacaaaggatacgtatgaagtaaacagttcgacaatggctgtcctgcctctgggagagggggagaaacccgcctcaaaaatacttgagaccgacaggactttccgcgtcaatatgaagccgtttcaaattatcgaaagaagctgccgctatttcggatcgagctatgcgggaagaaaagcgggcacatatgaagtcattaaagtttcccataaaccgccgatcatggtggatcactcaaacaacatttttcttttccccacattttcctcaactcgtcctcagtgcgggtggctttcccatgcgcatgttcacgagttttgcgcggcaaagtatgacaacacgtttgtcacgtttgtcaacggggaaacgctggagctgcccgtatccatctcatctttcgaaaaccaggtttaccgaacggcatggctgagaacaaaatttatcgacaggattgaaggaaaccccatgcagaagaaacaggaatttatgctctatccgaaagaagaccggaatcagctgatatacgaattcatcctcagggagctgaaaaagcgctattgatctggagcggctttgaataaatagtgctcaagaagcgcggatacctggttgcggatgcggggattaaagtagttatgctcttcttcgtaaccctcatatataaaggaatacatcgtaaaggcttcgtcccgcgacacttcatgcaccttgattttccggcggcgcagttcattttttacgtcgtacaggtcgcgctgggcaagctttaacgcctgttcgatcagatgcagataggggtctttcagcttaaacggcccctgctggatgattttcatgtcccggtttaatatgctgacggtcatcgggaggtaaatcgccttttcaatcatatccctggcttcggcgggaattcttgtcatggcttttctcctcatttctttttttgttcaggaacatttgttctgtttttattttacacgaaatacggccttttaatcaagaacgggaaaaaatgactaaaatgatcaggttgtttcagactaatacagaaaacaaccgagacggatgatttaaagtttttgatttaaagtgtagaatagaagtagacaaccgccctgaggagaatcaatgttggagcaattattcagctattttacagaagagaatttaacagagttttttcagagctacagggcttttggtccttttgtagccgtactgctgccgtttattgaagcgctgctcccgtttttgcccctgctcgtgtttgttgttgccaatgtaaattcgttcggtttatggcaggggtttttgttgacgtgggtcggggcatctttaggttctatagcggtttttctttttatccgccatttcggccagcaaaaagcactcggttttatccgcaggcatccatccgtaaaaaaactgatgatctgggtggaaaaacggggcttcggtccgctgtttctcctgctttgctttccattcacgccttcggcggcggtaaatgttgtggcaggactttcgcgagtcagcctgctgcctttttcattggcggtgctttgcggcaagttcgtgatgatttttatggtgagctttgtcggccatgatctgaaggcgctttttacccagcctttgcggacagccgccgtgatcatcgtcatgctgatcttatggtacgccggaaaacgggttgaacatcgtctgaacgtgagattcagccagagagagaaagactagggggacacagaattgaaaaagcgttttttggtcatagccggggtactgcttgtcatcgtcgtcgggattcaggtcaaaaatgccgttttcattgaatataaagtagaaggcgtcagcatgaatccgacctttcaggagggcaacgagcttttgatcaacaggttcgcccaccgctttaaaacgatcagccgatttgacatcgtgctgtttaaaggacctgacaaagatatattcattaaaagggtgatcgggcttccgggcgaaaccctcaggtatgaagatgatcagctgtatatcaacgaagaaaagatcaaagagccttatctggacgacttaaaggccgtcaccgccggaggggacttgacaggggattttacactgcaggaagtgaccggagaggagaaggtgcctgaaaacgagtacttcgtcctcggggacaaccggatccacagctttgacagccgccatttcggctttgtttcagaacgggacatcgtcgggattgtgacggaaagaattgataagaagtgattggagagtacgggggagagtaagcggccgaccaaggaatacgattacgcaaatgacgagcccgaaatgtcaattagtacaacagcatcaataatgacgcatttgctaaatatgaaaattaaaaggcccggatgattccgggcttttttccgtactacttcagcttaatggcattgatccgtttttgcagcttcgttttttcggcggatgctttcagcttgcctactgctgattgcgctgctgattttgtttttttcgttctcttttgttcggccgttttgactttggcctttgctgcagaaacttttttattataggctgcagctgcttgctttttcgcggtgttcagccttttttgcagatttgatttgtcttttccggcgggaagctcattgatcgctttttgcgctttgccgaggtttgagtctgttgccgctttttcagctttggcaacggcctgctttgcggtcttcaagaggcttgaacggaccgcgttgatctgtttttgcaaattcgttttgaaagtgccgctgtcgagttcgttgaccgctttttgggcggagtcggcattggttttctttttttgcttctcagcgagtttcactttgctttcggctgtttttttaagctgctctttaacagtattgagtctctttttcaaagcggttttatctgcgtctgcagggagcggttcgatcgctttttgtgcggtttgaatgtccgcttttttctttgtcttttccgcttgtccgacggctttttgcgctttttccaatggctgtgtgacctctttgaagcggattaatccgtagccgaacaaatgatcacggccgggagcgcccaaatcgcttgtataaaactgcattttcttgcgcagctcagcatttgaagcggttgggtacagctgtttcaaaagtgcaaacatgccggtgacgtgcggcgttgcctgtgaagtgccgcttccgattgcatagccgcgatcggaagatgtactgataatcgatgtgccgggagcggaaaactcgacggcgctgccggtgttggaaaatgaggcgatctgatttttttcattggttgccgagacggcaatgacgctgctgtaggcggccgggtaataaacggattttccgtttccggcatttccgctcgctccgactaaaatgattccccgtttgtatgctttatctactgcatcgtggagaacttgactgtcgcctgaaacgacgaggctcatattgatgatatcgattccgtgctggatcgaccaatcgatgccttgtaagatacctttcagatcccccgcaccattccggtccagcgcttttacggcatacagctgcgcgccgggcgcgatgccgtcgatcccccgtccgttatgcttcgctccgatgattccggcaacatgggttccgtggccattatcgtcacggtatgaagcggtatagccgaccatcgatgcaccgccggcgatcgacagctcctcatggggggaaatcccgctgtcaataaccgcgatcttcacctgttttccggtcaaacctttattccaagccagtgcggcttgaatcagcttgatgttccactgtgaaaacgcggaggcgttttgcgctgtgctgctggagaaagcttttagagcggtgctgtcggcagcagctaccaggaggttgtcttcgacatacaggacgtcgggatcgtgttcaagttcgcgcactgttttgtcgtccgcagtgacagcggctgcgggaatgtgccggtaaacgtgttctaccgtgtctgcctgttcgatgacggtttcttttccgctggtatttttatatacaacaatgacctcgttttcctgcttattgctttccgcttgaatgcggggtgaatttgcgaaaaaaccgacgaacattgcagccgaaaccgcgattttccataactttttcatccggctctcctccttttttagcggcgttcgctatatatatcggaggatttttgaattttcaaagagaaagaaagcttatcttaaggtcgcttgtcatgcacctttagtttttaaaacgttaaaaacactgttatatcaacatttgtgaagcttcctgtttattcgggaagttaaattgagtactccaagttagttttaaaaaagagtcataaggccagcttctatcgatgaatcatttttaagcgacgccttttgtctaaaatgtataatgttacttttgtttttgttgaaagtgaacaatgttattgactggcttacaacctacaatttaattaaataaaaaatagattaaaagaagggagcgttctcataccgtggaaaaaacaattaaacatgaccccaattattacaaaaagataattattgcattgtgtttagggtgggtcgctatttggatttatcgtacaatacttacgccaatatatccgcagattcaagaatcattagggaatattagtgacacgcaaatagggttggttgcttctatttatttctttgcatatacgggtatgcaaattccatcaggagcacttgtcgataaatttggacaaaaaaaggtgttaattcctgcatttatcgtttttgcgctggctacatttgtgattggcacaagttcaactatcatgcaagtatacattggttcgttattggctggtatttcgactggttcatattacggtgcagccttttccttatcagctaaacatacgccaaaagataaaaaaagcttttccaatgcgattataaatagcggttcagcattagggatggtaattggactaatcggatcatcggttttagtaggcggttttgaaattcaatggaattatatgctttttataacagctatcgttatcgtagctgtaacatttgtgtttgtgctgtttattaaacaagataaaacatcagataaggaagtggctgaagagaagaaagacactgtacaaagcacagatattcaaaatgaaagcttattttctccaagacaattagttgtatattttgtatattttgcaacatgctatggctattatatgattgtaacttggttgccgtcctttcttgtagcagaaaaaggatttgctcaaggttcagtaggatatgtagctgcactagttgcggtcactgcagtgcctggtgctttgatatttactaaatatatagacaaaaatgcacatttgcgtctgcgtttaattttatttttattaattgcagcagcagtaacaattagtttgacagtgtttgcaccaaatcctgcagtactgtatattgcgttaattttatatggcttattaggtaaacttgcgattgatccagttttaataacctatgtatctgattccgtatcaggagacagagttgccagagcattaactctctttaacttctttggaatgagttcatctgttattgcaccaacacttactggttatattggtgatgtaaccggctcgcgagtattagcattctatattgcaaccattcttcttgcagcagcagcgttgctatttttccttgtggttatgttaagacagaataaaacagcagctaactaagagaacttccagtggtgctcctttgtattcacaacgatattttctctgaagcaaataacgccaaacgaatgctcagtgatgtatcaggagactctacagattgacctaatatttcttcgcattttttaatacgatatttcacagtattacggtgaataaaaatatcttctgaggtttttgtaagatcacattggtttgccatatagacacttaatgtgaatcttagttctttttccttcgttgtctgaggataggctaaaggaccgagtgtataaatgataaatggctttaatttattcgttggaatgagttgtaataattcttctacgcttttggatttgtagggctctataaattccatttcgccttgttcatatttattatcataagcctcattcgcttcgaaaaaagacagtggcaattgtgaaagctcggaaacctcattaccaatgccaaatgaaagggagctattaaaaaatagctgatactctttttggatatatctgcagtattccaaataataatgatgtcttctttgcagaagtatcgtaaatctgcgttctccctgagacatatatatgctaatggaagggtcaattccagtaaacttatgcgtcagccactcaaaagtcatctgatatcgctcatttaagtaggcgctattttctacattcttttctttgtcaatcccgcaaataatcacttgatagaatgtagaaggttgaatgtgatatttttttaaaagatcagtgtgttgtgctagtgaaacaaggttgtcaggatgttcggacataagtgttgtgaaaaaatggttcacgtcctgctgctctgcttccttgattttactatttttataaatagcgagactaagtgtgttcactgcctgttctattgttaataaactaatcggatagttgagcaaattaacatttgaaatcataagataatacggaaaatatttaaatgcaggaaccttaaatacagcatattcttcctggaaaacaccattatgatttggttcggtttgctctgaatttaaatatcttctgaaataattaaggtttttttgaacatgttctgagttttgatgaaagtgatgactcgatgattcaacttgatgaaaagaatttagcagcattacaggaacctttatgagtctacttaaacgttcaatcatcatgttcaggctaaacccttgcattagcatagcatttaactcttgttggatatctaatgcgaagtgtaatttttctgtttcttcatccaagataaatgaagatatatgatgagtaatggatcccaaattccaactttccggaatttcaataattgggaattttaatttatttgcaaatgcaataacctcatcatctaatttttttaaaaatcgggatagcttgatacctagaccagcaacttgtatatcatttaactctctaataagattgattagtccggattgatcatcctgatagctcattcctgttgtgacgataagtgagtgcggcgttgtaaaatttttaatatcaggcgtttctgtaatatcaaccatttctaccactcgttccaaatcgccctgctcattcagcaatgttaaatctgaaaattgcagtacagataatatttcttttaatgttgtcataaaggctgcctccttatctttgttagaaaaagataaaataaaaatgaaatatgtaagatattacaaggataacttttcaatctgatagtacactgtttttgaaggttattatacgtataatcctttagttaaaaatattaaaggagaatcattatgcttgaacaaaatcaagatattcatcatgattcttcgttttttgaaaagtgtggttattataaagatatcatgccgaagatcacttgaacaaagaaattcatcctcatttaacgttgcagtgggagcagggcgtaatattcagaatgatatagccgttggtggtctttttaaaactgggatcattaccgctaaaattaatggtatcccttattataagttccttcttagatagtcttaagactcgccgtaaacggatacaagggttcaaaacatatgcatttaagatatacctatggtgatataggtgctaactgcaaggtgtattacgtggtgctgcggattggatctcctcggtttgattgcagacatttgctggttcacaagctttattgagtggttccggctccacacaaataaaatcagcaaaaacataaattattggacaagtttccggtattgttgctgctcacgttttatttgcgttttcaactgtaaccattttaattggatgctctattgggtcaacaaggacggaatatactgaatgttgttaatcaataggatatatatttgcggtttccttgctacaggtgtacttctatttacagaaatctctatcaatgcagcaagtaatattattcttgcagcttaaaaaagaggaggatgattttgatgaattttgattcaattatcaaaaatggattagtcattctagaaaatggtgaacaagaagtcgaagtagggatcaaagatggcaaaatcgcagcaatcggtaaggatttgggtacaagtgcaaaaattatcgatgcaaaaggatctattgtatctccaggtatgattgatgcacatgtgcatatcacagagccgggcggcggctatcgtgatgaatgggagggctatgacacaggaacacgtgccgctgcaaaaggcggtgtaacgacgtttattgaaatgccattaaatcaagtgccagcaacggtagatgaggaatctattcaagaaaaatttaaagccggaaaaggaaaattatcagtagacgttgcgagttacggcggtttagtaccatttaacttagatgggggtattcaagaattagatagcaatggtgttgttgcatataaatgttttttagcaacatgtggcgaccgttctatagaaggagatttcatgaacgtagatgactattccctctacgaaggcatgaaacaaattgcgaagacaggcaaaatattatctatacacgctgaaaatgccgcaattaccgataagttaggggaaatagcatctaaaaatggggaaacttcattgcgtgcttatgtagattctcgacccgtatttactgaagtagaaccgattagaaaaattattctatttgcgaaagaaacgggatgtcgtgtacacatcgttcatatagcttgtgaagagggcgtagacgaaattgtcaaagcacaacaggaaggggtcgatattacatgcgaaacatgtacacactatttatatttctataaagaagaactagataatatcggaccggttgtaaaatgctctccgccaatccgtgagcaatcacgcttagaaggcatgtggaatcgggtattaaacggagatatttcattcgtaacatcagaccattcaccatgtaccccggacttaaaagctacggataatgcatttgaagcttggggaggtatcgcaggtttacaaaataatgtcgatgtattatttgatgaaggtgtgcaaaaacgtaatatgccattatccaaatttgcagccattattgctacaaaccctgcgaaacgttttaatctcgcatcaaaaggcagtattgcagtagggaaagatgcggatttcgtatttattaagaaagatgcaccttatgaattaaaagctgaggacttagcatatcgacacaaaattagtccgtatattggccgcaaaattggtgctcaggtagtgaaaacaatccttcgcggtgtcgaaatctatgataaagaaaaaggaatttcaaatgaaaaagtaggaagatttattccttaagtgacggaatagccatcccgtcaggaatttgaggcataggaagatgtgaaggcgacctgagattgtgttacactcgcaaatcagtgtgtcatcagcatttcttatggcggctatacagctgaagtgagcatggtaaagtgacttcaccgcaatctctcgctattacagcagcagctgttaatcaaattaaaacgagtaaaaaatttccaatatacactaacagcttagaattgctgctgctcgtatgtattctgactcttggcatatcattttaaactaccctataaatcaatgttttttattgatttatagggtagtttttttatttgcaccttatttattaatgggtaggagagatgtgtcgctcccatctataaatttttaagcgagcgatctgtgattttctttaggagaaattcgatgcaaatttaatttgttattttttgagtttttatgtaatcgaaagccaacagtttctttttatctctggcattagcccattatttagatacctaaattgattaaaaggtgtctttgttaaaagtgcataaaatgcttttctattattgttggttatgtcaatgaatggtcgtaaacagggttctatgatgaaagtaaatagagaaaggaggagaaaaaaatagatattcgatcaacctttgaaacgttggataagaaattcacaagttttggcggtttagaacaagggggtattacgcgtctgttatactctcctgaatggattgctgcagttcgcgaactggaagcgacattcaaggaagaaggtttagaagtaagctttgatgatgttggaaacttatctggtcgccttgttggaagtaagtatcctgaagaaactattttaacaggatcacatatcgatacagttgtagaaggcggtcatctggatggacaattcggtatcttatctgcattggttgctgtgaaatatttaaaagaaaaacatggtcaaccattacgaacaatagaagtactatctctcgcagaagaagaaggaagccgattcccatatacattttggggaagtaaaaacttctttaacttagccaaaaaatcggatgttgaaacaatagaagatgctgatggaattaaatttgaagatgcaatgcacgaatcgggttttgattaccgtaaaacagatcatgttcgtgacgatattaaagcatttgttgaagtacatatcgaacaagggaaagtattagaggcggaaaataaagcgataggtgttgtaactgggattgttggccaaaaacgttacacaattaacttgaaaggtgaagcaaatcacgctggcacgacaccgatgtcattacgaagggatacagttgttgcatatagtgaaattgtaacagacttaacgaaacgagctagagaaattggggagcctcttgtattaacgtttggacatgtcactcctgttccaaacacggtaaatgtcgtccctggagaaattactttttcgatagactgtcgtcatattgatcaacaactattaaataattttgcgaaagaaattgaagataaagttaaagcggttgcagaaacaaacaacatgacttatgacattaatttatggatggatgaagcaccgtcattgatggataaagaaatcattaaaataattgaacaagcagctaaggccaatgtgggggacagctataaattgatgccatctggtgcaggtcatgatgcgcaaatttttgcggattttgtcccaacagcaatgctgtttgtaccttctattggcggaattagccacaataccaatgaagaaacgaagatagaagaccttgtgaaggggattgaagtattgaaagatgtattgtttgaactagcttataaggaataataatgaaaaggagccagatactcatgagttacttaaatcataatcaaggatacagagaaggtttattagaaacacgttcagtaataaaaaaggataattatgcggtaatcacacctgatggcttggttaataatgttgtacctggctttgaagattgtgatgtaacgattttaggatccccgcgtttaggtgcaaggtttgtagattatttggtaacagttaaaaacaagggcggaaacaaaacaggttttgccggtgatggtatccaatcatttgtgtacgttgaatatggtaaaatcaacgcttttgcggatggtgaaaaatacgaattagcaaaaggcggattcttatatgtgcctccacacttacaattgacatttgaaaataataataatggtgaggacagccgtttgtttttatacaaaaagcgctatcagccgcttgaaggacatacaccagaaatcgttgcaggtaatgtgaataacattaaacaagaagcctatgaaggtatgaaagaagtattaattcaagatttactgccaaaagaaatcgcatatgacatgaacattcatattctttcattcgagccaggtgcttcgcatggttacattgaaacgcacgttcaagaacacggtgcctatatattaagtggacgaggtgtttacaacttggacaacgagtggatgccagttgacaaaggtgactatatttttatgggagcttatacgccgcaagcaacctatgcaattggtttggatgaaccattctcgtatatttattctaaggatgcgaatagagatattaatctataaagaggggcaattttaatgagtgaaccattagtgtatgtagaacgtaatcgtctccggcagctaatgaaagataaattagtgaaagcaggtttacctgaagaacaagcggataaaacagctgatttactcatttttgcagatgaacgaggtgttcactcacatggtgcagtaagaatgcaatactattccgaacgtgcattaaaaggtggatataacctgaaaccaaacttaagcttcgaaaaaacgggccctgcatcggggatttatcacggagataatgcattagggcattatgtgagttatcaagcaatgaaaaaggcaatcgaattagcaaaaacatcagggatcggtgttgtcggtgttaaagaaatgggacacagcggtgctattggttattatgcacatcaagcagcattagaaggtatggcggcattaacagtatgtcaatctgatcccatggtcgtgccatttggcggcaccgaaccatactttggcaccaacccaattgcttttagtgcgcctagaaaagacggtagtccaatcctttttgatatggcaacaacggtacaagcctgggggaaaatcttagatgcaagaagtaaaaacaaatctatcccagactcatgggcagtggataaaaatggagcgccaacaacagacccgtttaaggtaaatgcattattaccaatggctgggcctaaaggatacgggttagcgatgatggttgatattttatcggggagtttgctcggcttgccatttggcaagcatgtcacttctatgtataaagatttatcggagtaccgtcgattagggcagcttcatctcgtaatcaatcctgaatactttggtgggaaggagcaattcctggaaaaaatatctcaaatggttgaagaattacatgacaacccacctgctgaaggatttaacaaagtgtattatcccggtgaaattcaaatagatgtgatgaaacagtataaaaaaacaggtatcccagttacaaaggaaattttagattatttagagtcagacaaaatttactaatcatgtaatgaagggggaagcagatgcgcgtatctaagcaggagctgtttcatttaatcaaacagaagctgatcaaagctggattaaacgaaggagccgcacacgatgtttcagatgtattgacattcgccgatcatagagggatccattcccatggtgcagtacgtgtggaatactatgccgaacgaatcgcaaaaggcggtattacagcaaacccaaactacacatttgaacaaacaggacctgcatccgccgtctttagcggagataatggcccaggtcaccaagcagcaaaacaagcgatggaaaaagcaatcgaaatggcaaaaaattcaggtgttgctgttgtaggcatgaagaatatttcgcatagtggtgcattgggttactttgttgaaatggcagcagaacaggacatggttgctttaagcatgtgccaatcagatccaatggtcgtaccgtttggaggaacagaaccatactttggcaccaatccaattgcttttagcgcaccatcggctgatgaacgcatgatcacatttgatatggcgacaactgttcaggcatggggaaaagtattggatgcaagaagtaaaaatgaatcgatcccggaaacatgggcagtagatgcagccggtgcaccaacaacgaatgcaagagatgtccatgcacttgtgccaattgccggtccaaaaggttatggattgatgatgatggtggatgtcttatcaggcagccttcttggagtacctcatggcgtacatgtatcttccatgtatcaagacctgacaaaaggccgagatttagggcaaattcatattgtgatcaaccctgcatacttcacagatttaactgcttttaaacaacagatttcgacgatgcttgatgaattaaaagcacaaccggcagcagaaggctatggggaaatttattatccgggtgagcgcggtaaattaagaagtgcaaaatatgataaagaaggaattgaaattgtagacgatatttataactacctcgtttcaggcgatgttcattacaatcgttatcatggaaagaatagatttgcagaataacaaaatggaggatcattatgttatacacaattataaaagaaaacacctatcaagattctatcgtgttaatgcttttatcaaacaagttatctgcaatagatggtataaacaaagtttctatcatgatgggaacaccagctaacaaagacatttttaaatcttcggggttgggcacagatgaattggaaaaagcaaacccaaatgatatcgtcatcgttatagatacaaaccaagaagaaaaggtatcggaagtgaaagaagaagtagaagcagctttaaaaggagactctgcttcacaagacagagctaaagaccaagaagcacataactggaagcgtgcaatggagcttgcgaacaaccctaatctggcattgatctccattcctggtcagtatgcagcaatggaagcggaaaatgcattgaatgaagggttacatgtatttctattcagcgacaatgtatctaaagaagatgaggttaagttgaaacaaaaggcgcatgaaaaaggattattagtcatgggaccagactgcggtactggaattattcacggcgtgccactggcatttacaaatatcgtgaatgaaggagatattggcgttgtgggtgcatcaggtacagggattcaggaagtgacatgcatcattgaccgtcttggtaaaggtgtaacaaacgcaattggtacaggtggtcgggatttatcaacagaggttggtgctaccacggttttagatagtatcaaagcattaaatcaagatccacaagtaaaagtgattacagtaatttctaaaccgcctgcaaaggaagtgcagcaaaaagtattaaatgtgttaagaaatattgaaaaactggttgttacgttatttttaggagataaaccaacttatcaggaagaaaatatttatcatgcgtatacacttgaagaagcagcggttgtatctgttcaattatccaatggcgacaaaccgaattttaaaccgacagtggctgaaaatgtaaacgtgtcgttaaaagattcacaagttggtattaaaggttattactcgggcggcaccttggcatctgaagcagctgtgttagtgaaagaggcattcaaagaagaagtacctgaagagaagaaaggtgcctatattctaaaaacaaaacatcatgaaattattgacttaggcgatgatatttatacccaggggaagccacacccgatgattgatcctgaaaaacgcatcgaaatgcttgaaacatctggaaacgatcctgaaacagcagtcatcatgattgataacgtcattggctatggcagtcatgatgatatgacaaatgaattagcaccagccattaaacgtattttagccaatgcacatcaggatggccgtgaacttgcagtgcttgtaacagttgtaggtacagataaagatcctcaaggttacgaaaagcaaattgaaaccttaaaagaaagtggtgcaatgatttgtgagacaaacgatcaaatggttcgtacagcgattaaactggcaggaggaaaagtggaacagccagtccttgacatacaaaaatttgaatatacccaagaagacttgacagtagacgaaaaaattatgtccttaatcaatacgaaaccaagtgtcatcaatattgggctgaaaagttttacagcagctgttcagaagagcggatcagagtgtgttcaatttaactggcggccaattgctggcggtgatgaaaagctaatgaaagtgcttcaatatctaaactactatgaaggagagacaatctaatggggtacaaaacaataaatgaagcgaacgaagctgttatccggaagatcatagcagctgaaccattcttgaccgatgttgtacctgccaagtctgtgattcctgaattagaagattatgtgttattacatgctgggcctccaattaaatatgaaaatatgacagatcctatgcaaggctcttgtgttggagcgattctttttgaaggatgggcagaagatgaagagggagcgcgtggtctgcttgaaaacaataagattacatttattccatgtcatcatgtgaatgcagttggaccaatgggaggcattacatcacctaatatgccggttcttgttgttatgaacaaagagagcggcaatgaggcgtactgtcaaatgaacgaaggcatcggtgcaatattacgcttcggtgcttatcatgagcaggtaatcaatcgcctgcactggatgaaagatgtgttgggtccagtgttaagtaaggccttaagaaaaattgatggaggcataaacgttaatgttttgatggctaaagctattgcaatgggggatgaatttcaccagcgcaatattgcagcatcattggtgtttttaaaagaagttgctccagtaattgtggcattagatgatgttgaaaacgaacaaagtgcagaagttatccaatttttagctgatacagaccaatttttcttaaacattgccatggcgactggaaaagcaataatggatgcagcgcgtacaatcaaacatggtacagtcgttactgcaatgtgccgaaacggtgaaaactttggcattcgtattgctggtatgggagatgagtggtttacagcacctgttaatacaccacaagggttatattttaccggctactcagcggaagatgcaaacacagatatcggtgattcagcgattacagaaacaatcggtgttggcggcgtagcaatgattgctgcccctgcagtaacgcgttttgttggaacaggcggatttaatgatgcgcttgaaacaagcaatcaaatggctgaaatctgtgttggagaaaatccgaactttgttattccgacgtgggacttcaaaggtgcgtgtttaggtattgatgcacgtaaagttgttgaaacaggcataacaccggtaatcaacacaggtattgcacataaaattgctggatatgggcaaattggtgctggtacagttcatcctccaatcgaatgttttgagaaagcaatcacagcatatgctgaaaaactaggttttcaaggatgattttacaggcaagtgcggttggttcaatcgcacttcagctattaattgagggaaaaacgtttactgtacacagcatttttgaaaaaggtttaaatattgttgatcggaatgatgaattgatatttatcggcacaaatgaaaatgggaccttcccatttggaatcttgcttgactcacaaacgaagcaaacattaaaagcagatcttgaagtgggagatacatttcacgttcgcaatagccatctttcccacaattgttttgaactcaattttaatgcggaaatacttccgttatatacagattttaaacatgcaaatataaataaattaaaagaaaacgtgaaacaaatttcatttaaatcgtatgaatctactgattttgaatcagctcgcgtgtcggacttgataaataaattacacgatccaactgaaaatttggaggaagagcttcgttactttatcggtcggggccaaggtttaacgccgacgggtgacgatatactggtcggtatattgtatggacacttcatcaactcttttatcgccgaaaaacaccttgaaacattgggaagtctaatcagagaacccttaacaacccttgtcagcacgcgctttttaacttgtgctatagaaggcttgtttagttcaaaaattacaaaattacaacatgattcatctttgaaaagtataaaaagtcttataaaagtaggttcttcttctgggatggatactttatatggaatttatatggctttaacaaaggagtgaaagaaatggggaaaagtgtagtaatcgcactaggaggtaatgcaattttacagccaaaacaagaagcaacttatgctaatcaattcaaaaatgtaatctctgcaacacgtcatatgattgaaattaaagaagcaggacataaaattgtgattacacacggcaatggtccgcaagttgggaatattattgctcaaaatgaagctgccaaaaatgtcgttgaaccgctgccgatctatgcttgtaacgcagaatcacagggattcattggttatatgctcgaaaaagctttaaaaaaccatattaaaaaacggggcattaccgcgaatgtagctacatttctaacaatggttgaagtggacaagtatgataaagcatttgaaaaaccaacgaaaccaataggagtattttattcagaggaagaagcgaagaaattggagaaaaaagggtttgctatgtcagaagatgcagggcgtggctatagacgagttgtgccttccccagaaccgaaagtgatccatgggatagaagagattcgacgtttaattgatgaaacgattgttatctcctcgggcggcggcggtatacctgtatatcgtgacgacagcggtctattacatggtcttgaagcagtaatagacaaagatcgttcaggattaaagctggcacaacaattaaatgctgatgttttcatgatgttgacagacgtaccaaatgtgtttatcaattttggcaaagaaaatgagcaaaaactaagccgaattacagtagaagaagcagaacaatatgtggcagaaggtcaatttcctgctggcagtatgctgccaaagatgcaagcggctatagaatttgcaaagttaggtaaagaggcaattatttgttcattgaaccaagcggcagctgcactagacggaaaagcggggacgcgcataacaaaataagacgatccgtgtatgttcataaggtggataaaaactaaaattcccaccttttcagatatgacgacatttgatctgtcattctgatcaaaaatttctgaacaatctttataatgggattctttatgctgcgcagacagatttcgaaaagaaacaatctatgaagtctaggatcgaaagtcaaaggattagtggaaaaagttgaaggaggaagtttgatgacaaaagaggcgggatcagttgaaggtaaaggaaaacaaccactggttccctattgggtaaaagttgttatcgtatttttcttcggttgggtggctctttatgcaacgcgaacaatattaaaccccattatgggggatattgaatcagcgttttcattaagcaaggcacaacttggcttaattatgagtatatttttcatcggttatgctggtatgaatgttcctgcaggaatattaggagataaaattgggaaaaaacgagtgttggttccaggtgttattctatttggctcgcttgcagcagttacagggatgatgcccacattctttctgtttatctctgcatggcttatggttggtatggctcagggggtatattatgggccgcaatatggaatatcatccgaaattatcccgaagaaccgtctaacattaggcagtgctgtgattaatgcagggatggcttttggtacttcaattggctattatatctccagttatgttgttggagaatggggattcggatggggaaccccattttttgccatcgcagtgccggttgtacttatcggcatcgcaatggcaattgtaattaaagacaaaccaaaaactgataaagaggttaaaaggagcgctgaaccgtttaagttttcatctttatttaatagaaacttaattttggcatatattattattttctgctctatttacggattctttatgattattacttggttgccatactatttagaaacagcacgcggtttaaccggaggaaatattgcctttgttgcatcacttgttccatgggcagcaattccaggttcattattttttagttggctgtcagataagttaggccggcgcaaaccagtattgctcatgatgttgccatttggtattttatcaacagctgcaattgtttactttgatagcttaccaattctgtatatgacactaattgtgtatggaattgtagggaaaattagcgttaaccccgttttaattgctgttgtagcaaataatgcaccaaagcaatcattaagtacagcatttggattctacaactttgttggaatgttaggttccattttagctccatatattactggctggctgacagacactacaggaagtatgaatataggattttattttgcagcagctctgttagtaatcgcgttgattgcaacatatttaatagacgaaagtaatttgccatctgttgataaagcagctaaacatcattagttagcaaaagcttatgacttctagtaaatgctcagtcagattaagtatgaagagactcattcactgcaattgcgcttcaagcggcacaacaaaggcgacagccagactgataagatgcatatagtaaaccattcggaattgagatgttaaaatttagcggcttctttcaaaacagcatggactaaaatgacgctggacaaagcagtgccctcagtctgggaaaagaaacacagacggaaaagaactgagctgcagcccggctggaggaaaaggaaaagtgctcccggggcagacatcctgttatacaccgatggttgatttcgatccgcgttcttcatatgcgatgtagaaacattatcaatccattaacaggagctctcacttattcctatacaagttcgtattcatatttgaagaagtagtgtataaaagcaccctttcagcaagggtgctttttgctgtcttatcagtcacggtttcacagctattgaagagtcatttgacctaataaaagagtgggaaaagtgggggattcaggaaactgtgtaaaatgaactattactattaatttatacagggaggaaaatatagtatgatatgaataatgaataaaatacaaaaaaattgaatatcggaagaaaggagctccatatgaacaagatcgccgcggaagaagtcgccaacatccttaatacatggtaccgcgccatcagaagaaatgatgctgaacagtcgatccgaatatttgaagaagtcaaaccgatgctggcagagatggaggaagaccaagaggttttaatctactattctctgctggaactgcggcataaaatcatgctgtatgatacgcggggaaaaaagatagaacagcaagaggagttaacgaacggcggcagtgctgcatcacatatgacatcctattactactacctgttttcaggagcttatgaagtgtataaaaagaattatgagcaggcgatcagcttctataaaattgccgagaagaagcttgctcatgtacatgatgaaattgaggtggcgcaatttcacgataaagtcggaaagctctactattacttgggccagaatatcgtctctttaaaccatacccggcaggcgatggaaattttcaaggggcatggcgaccatgatatgaaccttgtttccacttatattacgatggccggaaattatacagagatggggaaatatacagaggcggaagaatatttaacagaagccatccatacggtaagaaaagccggcgactgttttaaagaaatgcagctccttcataattttgccttgctttatgcggcgatggacaattcggaaaaaagcattcagtttttagaaatcgttttggatgatcaagcatatgctgcatcagattattatttcaatgctgtgtttttaatgatcaaagagctgtttaaagtcggagaccataaacgcgctgcagccttttacaaagaagggaaggaaaggtcgaaatccgcggcgaataaaatatttgacgccaaaatcgatattttatatgcggcttatgcaggagatggtgaacaggcggttaaagactgcaaagacaacattgaaatcctgtttcaaacaaagcaatacgacagcgccagagaactttcgctcttaacggccaatgtttacagatcaaagtcactttataaagaagccgcacatttctttttggaagcgattaaagcggaagaaaaaatgaaaaaagtggagggaatgtgatgaaaaaactgttcattgttgctgcgattgctgccgtcgtatgttcgggatggtttgcggcagaaactcactgggcatccggcgacatgcaggttgctgaaaagatggtcggttaaatcgaatactcggaacaaatatgaacatccgctcctgagcatcagggcggatttttttgggaaggtaaagtaaattaaggcataagaaacgcggttagacaatgaacacttcttcaccactatttagggtggtcaacctaaacaaaggtacgaaacctgtgctgactacttttactccgatgtcctttcagctattcttgtcagtaagatcattccccatctcttcaacgcctcaggcatcacctattaaaaaaatcataattgaaacttgtcagcaaatatgttgcataacacgaggatgtttccacaataattaaacattaagacttttttgacttccagaaggaagaacaagatatttatgtaaaatcactcttttattcaaaatcaagatctctttcttgagggttttgcttttgagtgaaaatcccattctaaatttgtccatttaatggtattatttacttatataataaagaaagtgggaaacaaaacgttgatgttaattgcttttgaattttaccgaactatactcccagcatgaagtatttgttattttcaatttctttagtgtgataggtgcatttgttggatatttaaagagcaacggaagtattcaaatgcccctcttaatgattgattataaaagaaagtgggaacacaaaaatgtaagccactttaaaaatcattaaagttttcacggattgttattgagttattcctttttttattgggattagatatggaagaaacaaaagaaatgatgaaactatgtttgaggtcatttcttttgatatcctattatcaaaattacataatcaaagtaaagagcagaccagcggcctgctctacttttatacgagccataagatgatttccgcaagggaatctgctgtttttttaggaactccggctttcactaaggcttttacaagagcgccttttgaagcactatttaatctttctgtggcatatgcaattttacgtgcatatttgtcgacgagtctcgctttagaaggagagagtggtctaatcgcccatttaagagtttttcccccaactctgcaaacccatccaaatgcttttatggcttttagagatccaccaataaggcctgcagtatgtacttgtccatcctgatttaactgattgtaagtttgaaattctggagtttgtgatgcaaattggatgaatgctttggaatcttctagagtagtaggctcttgatgtgtttccatatattcttgaagagaagctggcaatgtgacatacgtcgtttcggtaattgatgtggttgactgttcttgttcagcggctgagacagatgatgcgaacccactaaatcctgaaatgataagggttgtggccgtaagtgttatcacaccttgagaaaatctttttttctttgattacatttcaaattcccccaattatttgatattcttaacaagtaatataataccacaaaaagagaggaataggtataaatgggtgaaaaaaccaaagaaaaaaactactctattggggatcatatttttgcaatattggttgttcttcttatgtgtttatttcttatttcttccccttttctgatattcttcggagtctttaaattggtcgctttggcaccagatgtgtcaatcaatacaaaaggtacttttgattctgtgatcgttttattcaagttttttgttctcactgtggtagtcgtagggattgtagacgtagtgttttctcagattttattgaaaaaacgggggtttctcaattttgttattgaagctttgttgatgttttgtgttttttatctatatgtattgatttattcaatgcattctcaggagattgttatacggaataatggtgtattcttagtatctttatttttgtttattttgtatttgctaataaatgtagcatatatcgtttcacggcggttatataaggcaactatgaaaaacatacagaaaaagaacaactaaaagagcaggcagctgtctgctcttttaaaatttcaatcgccaaaagttccgtgtcttaatattgaaaccataaattgaatagactcttaatccgatttataagcacttcaggaacagcagccggatctagagaagtccaaaaagatcgcgattgaaaaaacttattttttttaatattgaaaacttttaccttgtttgttatgatttttttagtaaagtttagtgaatacggattccaaagacaggacgggatgaaaatggcgacgattaaagagattgcgcttcaggctaaagtatcaagcacaacggtttcaagggttctgaaccatgaccagtcattatcagtagcgcctgaaacaaggcagcggattttggatatagcagcccggctcggctataaaagcacgcgcaggcgccgcgaggtatatgcctcaggaagcggggaaagcccgcgcatcggcattgttgtctgccaatcacaggaagaagagctgaacgatccgtacttttattccatcaggcagggaattgaaagtgagtgttttgaaagaggagcgtttattacgaaatttattcagctgagcagcatccgctcgaatcagcctgtaggcgatgtcgacggcttaatcgtcatcggaaggatcaactttgccggtttgcagcagtgcatgggcgcgctcaacaacgtcgtgtacatcaaccatacagacaatgaagagctgcgcgactcggttgtcgtagattttgagaaggctacggggagggcgctgaaccatttgaaatcgctcggctatacaaggatcggttatatcggcggaagagaaaaagagcactttcgaatcagcgatcaggagacaagcgccattgaaatcgaagacaaacgtctgactgcgtttctggagatggccggttcggataacgcaaagcacatttatatcggcgagtattcgatgcagcaaggctatgaactgatgaaaaaagcgcttttagagaaaaacgttcccgaagctttttttatcgccagcgattcaatggccatcggcgcgctccgggcgcttcgagaatcgggactcaaggttcccgaagatgttgcaatcgtcagcttcaacggcattgaagcgtccgaatttgctaatccgccattgacaaccgtaaaggttcatacagaagagatgggccggacgggtgtgaagctgctgctcgacagactgaaaggaagggaactgccgctgaaagtgaccgtaccttcagagctgattattcgggaaagctgcggattcagcaaacggagctaatggtagaataaggcgctttccaaggaggtgacgcaaatggatttactaaattccagtaaaaaatgaaagcgctttttattcaccattaaaatatcataattggagtgaaattgatgaaaaaaatcattttctcttttgttctcctgatcattttgtctgcaatacttgcgggctgctccggaaagaatgccggaaagagcggagatgtcacgctcacaatgttttcgacaatgacaaacgacagtgaaaaaaacacgctcagaagcatcgcagatgattttgaaaaagaaaatgaaggcatcaagatcgatatcagctttcccggcccggactatgaaaatatgctgcgcgtcaaaatggcggcaaatgacatgcctgatttgttcgatacgcacggctgggcgaagatccgctacggggaatacactgctgatttaaaagacatggattgggtgaagcatctcgatccaaacctcgatccgattttgaaggatgaaaaaggcaaagtatatgcctaccctttcaatcaggcaaaagacgggatcgtctacaatgccggtctcttgaagaaatacggtctcaagcctccgcagacgttggacgaactgatgcatgcgctggaaacgatcaaagaaaaaagcaacgggagcgtcattcctttttggtttgccggttcagataaaggcgctttagctcagttttatgatcagcttgccaccccgctgctcatcacagatgatcgccgcaatgaaaaaaaagctttggaaaacggcacattcgactggtccgactacacacttctcgcagaaacctttaaagagatgcaggaaaagcaattgatcaataaagatatcctgacggcaaaaccgtcgcaattggtcgaattgatggcgcaggaaaaaatcggttttaccctctcagtcacgtcgatcggccctgatacgagggaagtcaatccagatatccagttaggcgtgatgccgacgcctgccgtttatgaaggcgacaaaccgagctggattggaggagagcgccataccgttgctgtctggaaagactcagaacacctcgaagaagcaaagcggtttatcgaattcgccgcacagcccaaatacgtgaaaaagatcgccgaagccacctcatttcctcaggcattaaccaacacagaagctgaaaactactattctaagttttatgatcaatatgaagaaatcaaaatcgaaccgtactttgaccgcgtctatctcccgagcggaatgtgggacgtcatgggaacgacgggacaggaactattggccggtacgttaacgccgaagcaggtatcggaaaaaatgaaacaggaatacagcagattacaagaacaatagaaaggatcgttatcatcatgataaaaaaagaagggtgaaatgatgagcgaattagctaaagaaaaaagtctgactattgtgaaaagtaaaaggagatatgtgaggaaaaatggatcgctctggtggatgtatcttcccgccttggcgcttgtatccgtctttatgatttatccgtttgcgagcggcattaaaatcacgttcacgaactggaacggtttctcacagtcgtatgactggatcggctttgcccaatataaacggatgctggccgacccggcgacatggcttgtcgtcaaaaacaccctcctgtacggattgggcagtacggttttccagaatgtcatcggtcttctctatgccctcctgctgtttaaaagcatcaaaatgaaagcgctgacaagaacggttgtctatttgcccgtcatcatcagcccgctgatcatggggtatatctggtacttcttcttctcctatgaaggaggcgccttgaacgatttgctgaaactatttggagcaggtcctgtcaacgccttgagcagcccggaaatcaatccgtggatcatcgtatttgtcaattcctatcagtttgtcggtatagcgatggtcatttatttagcaggtctcggaagcgttccgaaagatttttatgaagcggcgcaaatcgacggagcaagcggttttcagcaattttggaagattacgctgccgctgttgatgccttctgtcacgatcaacatggtaatcaatatcatcggcggactgaagctgtttgatgtcattttagcgctgacaggcggcggtccgggaaatgcttcgcaatcgatgtcgacttttatgtacgatctgtattttaagaggcaggatgccggctatgcagccgctcagggggttttcatggcggtgttgatactgctaatcagctttacggctctcatctattttaagcgcaaggaggtcgaagcctagatgaatcgccaagagaaaaagaaacgggcgctgtggactttgctggctgcatggattaccgtttttcacctgattccgttttatattttgctgacgacggcgctgaaagcaaagggagatttcagttcaaaatggaagttcccggacgaaatcagcctcggtaattttgcagaagcatgggataaagcaggtctggccggctcgtttttcaatactgctgtgatcacttttgcttcggcggctctgctcattgtgatcggctctctggcggcatatccgctcgccaggcgcagaacaaagctcaatcaagccgtttacttcctgtttatcggcattatgatcattccgccgctgacatccatggttcctttatacaaaatggtggtggagcttggcatgctgaatacgcttgaaatcgcgatattgaataatacggcggcttatatgcccttgacgatttttttgtatgccggatttatccggtcgacgattccgaaagagcttgaagaggctgcgagaatcgacggggcgagcacggcggggattttcttcagaatcgtctttcctttattaaagccggtgactgcgacgatttgcattattgcctgcgtattcatctggaacgactatcagttttcgatctttttccttcaagacaaaagtgtgcagactttgactgtagcgattgccggcttctttgggcaaaatgcgaacaacctgcacttggtggccgcggcttcgctgatggcgatgctgccgatgacgattctatttttattcctgcaaaagtactttataaaaggattatcagcaggagcgctaaaaggctagcgaaaatttcacggggaaaggaagatatgaatgactaaaattgcttttatcggagctggaagcacaatttttgcgaaaaatgtgctgggggactgtctgatggttccggcggtcaacggatttgaatttgctttgtatgatatcgatccgaagcgcctcaaagaatctaaagatatgcttgagcatttaaaaaaccgctataatgacacggtatcgatccgcgcctatgacgacagaaaggaagctttggcgggagcgaaatacgtgatcaatgccattcaggtcggcggctataaaccgggcacagtcatcgattttgagattccgaaaaaatacggcctcaagcagacgattgccgatacggtcggaatcggcgggatattcagggcgctgcggacgattcccgttttattggatatggcaaaagacatcgaaagcgcggcgcccgacgcctggctcttaaattacacaaacccgatggcttctttaaccggtgcgcttctccgctacacggacgtgaaaacggtcggtctctgccacagcgttcaagtatgcacaaaagatcttttcaaatccctcggcatgaagcatgaacgaatcgaagaaaaaatcgccggcatcaatcatatggcctggcttcttgaagtcaagcaagacggaagagacttgtatccagaaattaaaaagcgggcaaaagaaaaacagaaaacgaaacatggtgacatggtcaggtttgaactgatggataaattcggctactatgtgaccgaatcgtccgaacataacgcggagtaccacccttattttattaaaagccgttatcccgaactgattgaagaactgaatatcccgattgacgaatatttgagaaggtgcgagaagcagattcaaaattgggaaaagatgcgcggcgaaatcgtcggcaatcggcatttaacccacgagcggtcaaacgaatacggctcaagaatcatagaagcgatggaaaccggccagccgtttacattcggcggtaatgtcttgaataaaggattgattacaaatcttccggaaaaagccgtcgtcgaagtgacgtgcgtcgctgagcggaaccggatcactccgtgctacgcgggcgagctgccagaacagctggctgctttaaatcgcaccaatatcaatacacagctgttaacgattgaagcggcaacaacaaaaagaaaagagcacatttaccatgctgcattgcttgatccgcatacggctgcggaattatcgatggatgatatcgtaagcatgtgcgatgaattgatcgaagcacacggcgactggctgccggaatttgaataaaaaaataaagcctgagcgaagggatcagccttcaactctggcttttttcacgcgagggtgtgtatatttttccgatttttgatgaagcaatcggaagaatggaggaagcattgcgatcacgagcaccaccctcaacacttggacagcgacgacgaacgtagagtcggcgtgaagcgtgacagacgttgtcgccatttctgcgattcctcccggagcaaacgccaatatggccgttgtcagcgaaatgcctgccgctttggcggtgacggcggcgcttaaaatcattgcaatgatcagtccgacggagctggcaagtgcgacgatcagcgtttttctgacgccgataaacatatctttgctgatctttgaaccgatcgttgcgccgagacaaatttgcgacagcactgaaaagccgtggggccaccaggcggttgtgctgagtccggtcattgaggcgcccgcgatttgcagaacggccgcgccggtcatgcttccgagcagccatggcgcaggaaaccgcagtgctttcatagctttgcataccccgaatccgcccagcacgatcaacgcagtccatgcgatatgaggcgcttcaaatgccgatgttcccgcggccatcacttggctgccggcagcatgggcgtcgggatgcttcgcatttatgaaaaaaacgaaaaagggaatggtcatgacgacgagaagaacacgtatcatctgcacgagactgacgattgccgtgttcgctccgacttcctgagcgatgcccggcatcgcggaaagcccgccgggagccgttcccacaaagctcgtcagcatatctgtcttgctgaatctccacaagacaaagcccgacagcatggcgaacacgacggaaaggagaagcatgacgccgacaatcagccaattttccttaaagatcgaaatcacagacatgttgattttttggccaagctcaattcccaatagcatttggccgaactgaagccatccatggtggatgccgttttgtctgaccgccgctttcaacggtgacgggcgaaacagcgacagacaagcggcggcggtcattgttccgaccatccagccgattgtcatgccggtcaatgagagaagaaatcccccaaaactgctgatcaatatcaataatatatcccgaaggaaatctcttttttccctcaaatgaaaaaccttcttcctgtttactgcggaatcattttgttcactaagtaaagtatttctatatattactatataataattttagtgattggtaaaatacgaatttatttaaaagattaataagaaaaactaatcgtttatttttgaacataacagatcgaatatatgaatacattaaattagattgatcataaatagaggtgaaccgatatgaaacatcccaaggaatcattcaccaaagtcaaatcgtatcgcccgtttcacagcgcctttgatccgtgtccgccgatcggcaaaagatactacagaacccctccaaatctatatctaggttttcagccccgcggccttccgcagttttccccgatggaggcgctgcaaaaagggacgctttggcccgtattttacgatcattatgaaaatccgtatgaagatgggaggtaaggagggtgacgaactctttaccgcaagactattataaaaggcttcatgaaattcaggctgttgattttgtcatcgttgagctgatgctataccttgacacacatcccgatgataccgatgccatcaaacaatacaaccagtatgccggattttccagaaaactgaaagcgaagtttgaatcaaaatacggccctttgattcaaggaagcccggatcagacggaatcctattggagctggaaaagaagtccttggccatggcaagtttaatagaggaagggagtcaggttcatgtggctttatgagaaaaaactgcagtatcctgttagggtgagagaatgcaatccgagacttgccaaatttttgattgagcaatacggcggagcggacggcgaattggctgcggcgcttcgctatttgaaccagcgctacagcatacccgataaagtcgtcggactgctgacggacatcggtacggaagagtttgctcaccttgaaatgattgccacgatggtatataaattaacaaaagacgcgacgcccgagcagatgaaggaagccgggctcggcgatcattacgcagaccatgacaaagccctgttttatcataacgctgccggcgttccgttcaccgctacatacatccaggcaaaaggcgatccgattgccgatttatatgaagatatagcggctgaagaaaaagcgagggctacgtatcaatggctgattgacatgtcggatgatccggatttaaatgacgggctggcgtttttacgggaaagggaaatcgttcattcacagcgcttccgcgaagctgtcgaaattttgaaggaagagcgcgaccgtaaaaaagtgttttaaacagcaaaaagccgaaaatacgaccgtattttcggctttttatttactgcaccgggctcgcaagcagttctgctgcgcggtcgcgcagcacatatttttgaacttttccggatgcggtcagcgggtattcgtcgatcagaaatacgtactccggaattttataatacgaaagctgtcctttgcaaaaatctctgacgtcttcgagcgtcagctttttgcccggcctgcatttaataaaggcagccgttttttccccgtacttttcatccggaacgccgacaacctgtacatcgacaatatcctcatgttcataaaggaattcctctatttcacgcgggtaaatgttttccccgccgcggacgatcatatcttttaagcgcccggtaatcctcacgtatccgtcccggtccatttctgccaaatctccggtatggagccagccgtcttcatcgatggccttttttgtggcttcatccattttatagtagcctttcatgacgaggtatcctcttgtgcacagttcgccctgctcatccgggccgagcgtttccccggtgtcaggatcgacgattttcatttctacatgcggatgcacttttccgacggtctcgacgcggcgttcgatcgtgtcggtgacggttgtctgcgtaatcacgggtgaagactccgtctgtccgtatgcgattgtgatatccgtcatattcatttgcttcatcacttttttcatgacttctctagggcacggggagcctgccatgatcccggtccgcagagaagagaggtcatagtttgcgaaatcggggtgggtgagctcggcgataaacattgtcggtacaccctgcagccctgtacatctttctttttcgaccgtttgcaggacgatgtccggcttgaattcgatgattggcagcatggccgcgcctgacgcgacgcaggcaagcgtgcttaacacacagccgaagcaatgaaaaagaggaaccgggatgcacagcctgtcttcgctcgtcagccccattctgtcggcaacgatcgccgcattgttgacgatattgtagtgagtcagcataacaccttttggaaagccggtcgttcccgacgtatactgcatattaatcacatcatcgtgtgtgagtgactgctctcgttcaaaaaggtcggcatcagagaccgtttcgcccattttagcgatctcggcaaaagccgtcatatgttcaggggtctcgttcttgccaaggtagacgagatttttcagcttcggcagcttttcaggatttttcatgatctcatcgatcatattgatataggatgttcctttgtagccgtccatcagaaagagggtggtggaatcggaatgttccaataagtactcgagttctctcgcctgatagctcgtattgacggtgacgagcacagcgccgattcttgccgtagcaaactggagcagaatccattccggaatattggatgcccagatggcgacatgctcccctttttgaatgccgagcgcgagcagcccttttgcaattttagaagtttcttcaacaagctcctgatacgagtatcttaaatcgagctcagaatatacaaccgcttcatgattcggaaaccggccggcggttgattttaaaagcccgccgatcgtttgtttttttaatgtaaccatagtgcctccttgcctcccgaataaaatctgtttccattatagcactttgttctagtaccaggtactataaaggactagtttttttaaccgggacactgctcgatattgtgcaatccccccgagagccatgatccctgcaatggcaagaaaaagcgctgccccgccgaacttgatgaagatcatcccgcctaaaaaaggtccaattgtccgggaaatatcccaatgcgggccgaaaaatgcaaaatatccgccccgtatatgattgggagcaaggcgcgagacaaaggtttgcatgtgattcagaagcatgctttctgccgccgtaaataaaaccgcagtcgaaagcagccaaaagatcgatgaagaaaaagcgaaaccaatagcgtagcatacgtatgatatggaaacgatcgttttgatgttcagtccttccgtccatttgacgagcggaatttgcatcgtaatgctaagaagggcgcggcacactgtataaacagtcaaggtgaataggaaatcgtcaaaaagagtttcgagataaaggcggtagttggactccagctgagcatagaacaggctgacgggaaccgacaagaacatcaagggcagaacaggacggtgttgaagtaataccttttttgcggaaagaagattttccctctcgaaaagctcctattgcttttttgactgccagttccgctctatcaaaacaatatacgcgtcaaagcgggggtagctattcaaggcattgtgctgaatgaagaagggtggattctttttacggcgtctggtacaaaaaagaggctctactttaagagcccctccattgtgtctcttaatgaccggaatgtcctccatccgcagacttaatttccaatatgccatcaagaacgccttgcgtccgaaatgaaatctcattttctgacccgagaatgaatgcatggttgtatgggccgtcctgcggcctgtcatgaaatgaaggctcgatctcggacagatagctgtatagtgtgctgtctgcctgtccatttttgagtaaaagcaggggagcgtgttttcccaaatgggaaaatggcgctccggcaagcgcaagctcgggcgcagcggttgatgcaaaggatagtccgtgtcccggatctgtgatgccccagccaaagccggtgttcttatccctgaatttcgcaaatgcaatcgaatttgcgacaggagtgtctccggaaattcttttgactgttccgtattcctttaatgcattctccgttttttccgaaaccgcttttttagggccgagaatatagatgtttgctttggcgtcccttttctttaatgcttcagccgtctcttcgggaatgccttttttgttcacgtacaggatcggctcaggcatgtgggcgatccagtttacagccgggagcgaataaagttctgcatcatcctcggatgatccgatgatgacgcttttcggatattcaccggctgcctccgcgtattctttgtcaatctcttttgccagatcagccgcgttcttccctttgagctcttttattttaaaagtgttcaaagcttgaagcgcttttgaatcaaattctccgacagccatgatttgcgtcccgtctgaagtgcccgtcgggttcaagcgtttgatttcattctgaatttgcccggagattttccctttttccgcgattaaaacaggcccgttatttggatgatggatcaaatctgctgatgcaagagctgtctgccatgatccgcccgaaactagaatcactgcgctcggcctgttttgtttatgagtggccggccatatcgtttgagaggttttgatgctcatgtcttctggtgtattcgcgtcaagccttgtcgagttctttgtgtttttcaccaggagcccctcttcggcccgcttattgaaatcactcggaagagaatcagcgtctttttctttcatctccgaatgatcctttgtatgatgctcctcatgtccgccagtgtttcccgagccggaattttggcatgccgcaagcggaagcgcgaaaacaagcatgacaaaaagtaaaccgaatctcaatttcattgtgttttccccctttttggttcagattactgagtagtatacccgggaaatgtgcaaaactggtgcagacatctcgacattgttacacatcggaaggcagcgtgatgataaattcgcttcctttcggggttctgtttttcgctgcaatctgaccgccatgaagctcgacgatttctttcacgatggccagacccagcccggtaccgccggtttgtctggacctcgatttatcgatccggtaaaagcgctcaaatatataatcccgttcttcttccggaatgccgcagccttcatccgctaccgtaatcttgacctggtcctccaattttgatgcggtgacggccgctgttgattcaggatcggagtattggcgggcgttgttcagcaaatttgagatcacttgtgaaaagcggacctcgtcgactgtgacataaagatccgtcgggatgtcgaacgaaacgctgattcgcttttccgaaaaagcgaccgccgctttctgaatttcttttttcacgaatgtgtaaaggtgaacttgtttcttattgatttgaaatccgggctgtttcagttttgtcagcaaaaataaatcgtcaacaagggtgtttaaattgtccgcttcctctttgatgatcgacaagtactgatttctggcttgcggttcgagcttatctctcatcgcgacatctgtgtagccttttatatatgtgatcggagtccgcagctcatgggcgacgcttgacagaaaatcgtttcgctctttttgaagcctgctgagatttgaggaaaggctttcgattgatgcggcgagctctccgagttcatcattccttttgatatcaagcggaatcgaagcctgaccgtttttgatgctttcggttgcctccttcagtttaataatcggcttcgctaaaacacggctgtaccaaagaatagctgcgaccgttaagacgccggttaagccgaagctgaggaaaaaccgcttcgtaatgcttgccaccaaggcttttatcgaggaggtctccaaatacatgaagacgtagccggccgtttcccgtccgttcatgatcggactgatcgtacaaatgtactttgatgtattccaatgggaagataaagcggtcccgttcctcgggatgttctgttcttcgaaatgaaggtgttccgtcatgtctcccggggcagactgcgccaatacgcgtctgttttggtccgtgatgatcacgtttgtccgggcttcagtctccatcagggtgacgtggtctatcgtccttttgtcaaaatgcttttcgaggacgtctctgtggctgttgcctcttagttgaagcgcgcttatttcttcgtttattctcgtgttgacaatcgttgtatacagcgcggcaaaaaggacggcttcgatgaaaaggattaaaacgaaaaatgaacctgcgagctcaaatgaaatctttttcatgctccggttcctttgcttgtccatttgtagccgacgccgtagacggtccggagatggtcttcaaccggaaagcccgcttttttcaatcggtgccgcaaatttctcatgtgcgaatcgatggtgcggggctcgatatcagagttgaatccccagatgttctcaatcaattggtctctcgaaagcacttgatccatatggtctaagagtgttccaagcagatcgaattcacttggcgtaatgctgatttcacggtgattgacatgcagggtatgatgctgtttattccagattaaaccgcggaacctgatttcatgaaatcggcgggttctgcgcaggacggcttctattttggcaagcagcactttttcgctgaacggctttgttaaataatcgtctgcaccgcagttcaggcctcgtacaatatcatcctgcccgttttttgccgtcagcatgataaccggaatgcttgtcaatcttcggatctctttgcaaaccgtccatccgtccatttcaggcatcatgatatcgaggatgacaagatcgaaattgcgcatttttattaagtccagggcttcttttccggtggcggcttttgtgcacgaataatgctctaaataaagctccagcagatcgagcatccggttttcatcatcgacaagcagcacgttcaatgtctagcacctctttagtcaaaatataagtccgctattttaaaaatataccctataagggtatattgatcaaggcggaacgaactgaatcacctctttgacaagaagtataaaaaccagactgcatggttttgttcgtcagctgccgcccgcttgaacgcatcccgtatcgcccggtctttgacatagtctgcgatgtccaaataaaaatcaaccgtttcctgctcgtcttttaatgcggactccagcgcgttccaatactgttccggacaaggctccgtaatggaaatgtcaggctttcggccggcaagaggcgtataaaatgccaggaacgcattaaagtggcggatttcgtcctgtctgatttctaaaatttgctgttttgcctcagcatccggggccttttgtgcgattttttggtagcagacgaccgcactgtgctctccgtttaccgctttttctagatctttgatcagcctgttgttttgcctggcgggataggcgggatgatacggctgaacataccacatgtttttcacctcaatatcttatatttcgccgtcctgtcattatatgtaagtcgaagcttgcatgtgcctactggaagggcgcatctcggacatgtggcaaaatggtgtggggagagcgcaatctattttaaaaaaatgaagtttgacgtaaaatggttgttagtgccgaatggtgacatacatatcaaaatggagtgagactattgaaaaaggcaatattgacggtcatagctgtattgacgtcggttgttttgttcgccggctgccaagcggaaaaagggggatcagccaaggggcagtctgaaaaagttcaaattacggtttccgcggctgcgagtctcaaggatgttttaacagaactttcctccgtctatgagaaagaccatccgaatgtctctataaagtttaattttggttcatcgggtgcattgcagcagcagatcgaacagggcgctccggctgatttgtttttttctgccgctgaagacaaatttaatagagtagttgatcaagggttaattgacaaaaaagactctgtcaagctggtcgaaaacagtctggcgctgatcgtgccgaaaggaaaaagtcagcatgtcaacagcttcaaggatttggcggatgacaaagtcgaaaaaattgcgatcggcaaacctgaatcagtgccagccggaaaatacgcaaaagaaacgttgacgaaccttgacgtatggtctaaagtgcaatctaaagtgcaatctaaagtcgtctacagcaaagatgtaaggcaggtcctttcttatatcgaaacaggcaacgcggatgccggaatcgtttaccggacggacgccctttcatcagatcaggtcgagaccgtagagacggcgaaaagcgatctgcatacaccgattgtctatccgctcggaattgtgaaaaatacaaagcacagggaacagtctgaggaattttatcaattcctgcaaagcgaccaagccgttaaggcaatggaaaagtacggatttaagaagggctgaccgccgttatgcttgaggaattcttttccccgattgaaatttcaattcaagtatcagtcgcagcgggcatcatcgcagttttgcttggaactgctgcagcgaggctcctggcgaacagaaactttaaaggcaagtctgttatcgagacggtaatgatgctgccgctcgttctgccgccgaccgttgtcggattctttttaatcgtgatcttcggaaggcagagcgtgatcggacgcttgatagaaaacgtatttcaagcaccggttatttttacctggtgggcagccgtgatcgccgctgcggttgtcgcgttcccgttaatgtatcagtcagcaaaatcaggattttcggctgtcgaccgcgatatcgaggatgccgcgagggttgatggagcaagcgagtggagggtgttcctctttgtcaccgttcccctcgcatcaaatggaatcatgacggggattgtgctcagctttgcgagggcgcttggcgagtttggcgcaacgctgatgtttgcgggtatcatcccgggggtgacgcagacggtgcctacggcgatatacttggcgatcgattcgggaaatatgacgctggcatggatgtgggtcgcctctatcgcgatcatctcgtttttgatgctgttttttgtgcagttcaagcaaaaatagccgtatggggtgcaagtgctcatacggttttttcccagttttggagaatggttattttgcagatgtttcgatagaataaagagtaagaaacagaaaggagacgagcttagtgggagcagtatttttatcaggcagatccgggagtgggaaaacgacctttatcctgaatgaaatcagagaaaaacttcgcgatgaaccgctcggaaaaccgatcatttttctagtcccggatcaaatgacgtttttaatggaatacgagcttagcaaaacacccgatttgggcggaactatccgcgcccaagtgtacagtttttcaaggcttgcctggcgagtgctccagcataccggaggcatgaatcggccgtttttgacggggacgggcattcagatgctgctgcggagactgattgaagagcataagggcgagtttaaagtctatcaaaacgcaagcgataaaagcggatttacggagcaggtggaacggatgctgaccgaatttaaacggcattgtctgcagcctgaaagcatccgggacatgatagaggggacgggcaaatcggaatacgaagatgaacggatcctttccgataaattgcacgacttatatattttatacagcaagcttgaggaaaatctggagaatcaatatgttcaatctgaggattatttgacgcttttggccgagcagattccgtatgcggatgagattagaaacgctgccgtttacgtggacggatttcaccaatttacgccacaggagatgaacgtgctggaacagctgatggtacatgccgaagagatcacgttttcgctgacggcggataagccgtttacggcaaacagcccgaatgatctccatctgttcaggatgaccgggaaggcgtactatgacctttaccaaaaggcgaaggaactcggccttgatccgtctgaagtgcggctggaagaaacgaaacggcaccggcatcatccggagcttcagcatcttgaacgctattttgatgaacgtcctgcaaaaccgtatcccggacagacggaatcgctccgcatcatgcaggcgtcgaacagaagaaccgagattgaaggaattgcgcgcgagattcattctttaatccgccagggccggttccggcttagggatattgctgtcatcgcccgcaatgttgaagattataaagatacgataaaagaagtttttaaagactgcgaacttccttttttcatagacggcaaggaatcgatgcaaaatcatccgctcattgagctgatccgttcgacgcttgatatcattaaaggaaactggcggtatgaagcggtgttccgctgtgtcaaaacggaacttttattcccggaaggacagccgaaggaacggctgcgcgaacagattgaccagcttgaaaactactgtattgcgtatggcattaaaggagacagatggacaagcaaagatccgtttgtttacagaaggtacgcttcactggatgaggattttgccaagacagacaaagagattgaaacggaaaatatgctcaatgaactaaagggctggatcgttccaccgatccacaggctgcagaagcgcttgaaaaaagctgaaaccgtcagggaaatggccgaagccgtttacctttatcttgaagaagccgatgttccgatgaagcttgaacaggaaaggcggctggccgaagaaagcggtaggattgcagagtcgcgccagcatgagcaagtatgggatgccgttattcaactgttggacgagtttgttgaaatgatgggcacagagcggatatcgtttgctttatttcagcaaatgattgaaaccggcttggagtctttgaaattcgcgctgattccgcccgctcttgatcaagtgtttatcggcaatatggacctttcaaggatgtacggcacgaaatgcacatttctcatcggtgtaaacgacggtatacttccggcgaggcctgcggacgacggcgtgctttcagacgatgaccgggagtggctgaaacgaaacggcgcacagctggctgcgacgggtcgagagcagctcttggatgagaattttctgatctacatgacgctttccagcccgtctgaaaagctctatgtctcctatccgatcgcagattcggaagggaagacgctgcttccttcaacagtagtgaaacggctgaatgagctgttcccggacggcgaagagaagatgctgattcatgaacccgagcagctggacgacgaagcccagcttgaatttctcgtgaataaaggcgccgccttgagccatttggcagggcagctcggcatttggacgaggcagtatgcgatcagcgatgtatggtggagtacatacaactttttaatgaatgagcctgaccgcatcttttctcaaaatatcctgtccagcctgtttttcagaaacaaggtcgaaaacttgaaccggcatgtgagccgcgatttatatggggagcacattcagggaagcgtgtcgcggatggagacgttcaaagcctgtccgttttcccattttgcttcgcacggtttaaagctgaaggaacgtcaatttttcaagcttgaagctccggatatcggtcagctgttccactcggcgctgaagctgatttcagatcggcttcacgagcttaaactggattggcgcgacttaacgaaagcccaatgcgagactttgtcaagcgatgcagttgaacggctcgcgccaaagctgcaaaaagagattttgctcagttcgaaccgtcatcattacgtgaagcagaagctgcaaaaaatcattgccagggtatcgggcattttaagcgagcatgcaaaagcaagcgggtttgcccccgtcggcatcgagctcggattcggggggaaaggtccgcttcctccaatgcgttttaccttgaagaacggctgcacaatggagcttgtcggccggatcgacagagtggataaagcggagagctcaaaagggctgctgcttaggattgtcgactataaatcaagcgataaaggcctcgatttggccgaggtgtattacggcctcgccctgcaaatgctgacatatctcgatttgtcgatcacacattcaaccgattggctcggcatgaaggcatcccctgcaggcgtgctttattttcatgtgcacgatccgatgatccaggcttcggtgccgctcggccttgatgaaatagaaaaagagattttcaaaaagttcaagatgaaagggctgctcttgggagaccaggaagcggtcaagctgatggataccacgctggaacaaggcaggtcgaacatgatcagcgcaggcttgaaaaaagacggctcgctccgttcggattctgacgttattgcagaagaggattttcatgtattaaggcgccatatccgccggacatttcagaaggccggcgaggagatcacagacggtaaagtgtcgatcgagccttacaagctaaaagaccggacaccgtgcacatattgttcgtaccggtcattctgccagtttgacgaatcgcttgaggaaaacgaataccggatattaaaacccgaaaaagacaacgtgattttggagcggctgaaaaaggaggatgagacagatggagatttctaaaccgaagggcagcaattggactgatgaccaatggaaggcgattgtctcatccggccgggacattttagttgcggcagcggccggctccggaaaaacggccgtgctggttgagcggatcattcggaaaataacggatcaggaacatcccgtagatgtcgacaggctgcttgtcgtcacctttacaaatgcatctgcggctgaaatgaagcacaggatcggcgaagcgctcgaaaaagagcttgccgaaaatccgggatcgcttcatttgcgccgacagcttgctttattaaacaaagcgagcatatcaacattgcattcattctgtcttcaagtcatccgcaaatattactatttgatcgatgtcgatccggctttccggatcgccgatcagacggaaggcgagctgctcggcgatgaggtgctggatgaactgtttgaagaagaatacaaaaaaggcaatcctgccttttttgaacttgtagacagatatacgacagaccgtcatgacctcgacctgcagcatcttgtcaagcgggtctacgaattttcccgttcgcatcccgatccggagggctggcttcactcattggctgaactgtatgacgcggcttcggatacgaaggttgaggctctgccgttttattcttacattaaagaagacatcgcactcgttctggaaggtatgcggcaaaagctgacgcgcgcgcttgatttgacgaagcagcccggggggcctgctccgcgcgccgaaaattttctcgatgatttagcgcagatcgacaggctgattcagcagcaggatgatttttcggccctgcatgagcttgtaccgaccgtttcgtttcaacgattgaagccatgcaaaggtgatgagtacgatcccagattggttgatgaggcggcagacctccgcaacagtgcgaaaaagcagcttgaaaagctgaaaagcgattatttttcgcgaactccggagcagcaccttgagagcctgagggaaatgaagcctgtcattcagacgcttgtccagctcgtgctggagtatggcaggcggtttgcggaagcgaaaaaggaaaaggcgatcgtcgatttttcagaccttgaacacgactgccttgcgattttatccgtgaaaaatccggcgggcgaggccgtgccgagcgaagcggcgaagttttaccgccatcagttccacgaagtgcttgttgatgaataccaggatacgaacctggtccaggaagcgattttaaagctcgtcgccaaagaggagcatgaggggaacctgtttatggtgggcgatgtcaagcagtcgatttaccggttccgcctggctgagccgcttttgttcctctcgaaatataaacgctttacagacgatggctcgggttccggccagaaaatcgatttaaataaaaacttcagaagccgttcagatattttggacagcacgaactttttattcaaacagctcatgggagaaaaagtcggggaagtcgagtatgacgaacaagccgaattgaagctcggcgcctcttatccgccgaacgaagcgacaaaaacggagcttctgctcatcgaaaccccgagcggcgcgccgggtgaagaggctgaagagcttgaggcggtccagcttgaagcaagagcgatggccgggcaaatccgcaggctgattacagaaaaatttcaagtatatgatgccaaagcgaaagcgtcgcgaaacatccagtaccgtgatatcgtggtgcttttgcggtcgatgccttgggcgcctcaaattatggacgagtttaaacagcagggaatacccgtatacgcgaacctctcaactggttattttgaggcgacagaagtatcggtcacactgtctttattaaaaatcatcgataatgcctatcaggacatcccgcttgcgtccgttctcagatcgcctgttgtgggtcttgatgagaatgagctttccttgatcagaatcaaagataaaaaagcgccgttttacgaagccatgaaagcgtaccttgctgcagcagacggcgatgagaggctcagcgaaaagcttcgccgctttgacggtctgctcaagaagtggagagcttatgcgaaaaaccactctgtagcagagctgatctgggaaatctaccgggatacgaagtatttggattatgtcggcggaatgccgggcggaaaacagcggcaggccaatttgcgcgcgctttacgacagggcgagatcctatgaagcgacatcattccgcggcttgttccgctttttaagatttattgagcggatgcaggagcggggcgatgacctcggaacggcaagggctctaagcgaacaggaagacgttgttcggctgatgacgatccactcaagcaaagggcttgaatttcctgtcgtatttaccgccggtctcggacggaattttaatatgatggacttgaacaaatcttatctgctggataaagagctcggttttggaacgaagtttatccatccgaagtggcggatcagctatccgacgctgccgcttatcgcgatgaagaaaaaactccgccgcgagcttttatcagaggagctgcgcgtcttgtatgtcgcccttacccgggccaaggaaaagctgtacctggtcgggacggcgaaggataaagaaaagctgcttgccgactggcggacacaagcggcggggtctgagtggctgcttccggattatgaacggtttcaggcgaaatcttacctggatttcatcggacctgctttgatgagacacagagatatggatgaatccggcgcgccgctggtgattgatgagatccgtgaacatccggcgcgctttcaggtcagctggctgtcggccgcggatcttcaagcagaagatattgatcaggccggtgaagaaagacacggccggctctcccaaattcaaatggggcttccgatcgatggttcgtttgagtatgagcaacaagtcagagaaaggctgacatggtcatatccatacaaagacgccgccaaagtccgaacaaaacagtctgtctcagaaatgaaaaggcagaaggagtatgaggatgagtacggcgaccgctcgctgattcgcccaaccaaggatgctctcctgtttaaacggccgtcctttatgatggttaaaggcctgaccgcttccgaacggggaacggcgatgcacaccgtcatgcagcatattccgctgacccgtgcgcttgaaatgaatgagctcagccgcctcctagacaggcttgttgagaaagagctattaacagaagaccagcgggcagcgattgaggaagacgatattctcgcattctttgatacggaaatcggacaaaagcttctcggcgcccgccgcgtcgaacgggaagttccctttaacatgacgctgtccgccaaagaggtttatcctgatcttgagtcagccgacgaacctgtattgatacagggaattatcgattgtttattcgagacggaggacggtttttaccttcttgattacaaaaccgaccggatacacggaaagtaccgaaacggattcgaaggggccgaaccgattttaaggaagcgttacgaaacacaaattcagctttatgcacgagccgttgaaacgatgattaaaatgccgctcaaagggcgtgcactgtacttttttgacggaggacatgtgctcttattttaatatgaaaccggcgtccccctgacgatttcggggggagctttaatgaaaagagaggtgaggcacacatgcgaattttacatacagcggactggcatttaggaaaaacgcttgaagggagaagccgcctgaaagaacaggcggactttcttgaagagctcacaaggatcgtaaaagatgaaaagatcgacgccgttatcatggccggagacgcatttgacacagtgaatccgcctgcactggctgaacagcttttttatgaaagcctctccgccttgtctgacaaaggaaaccgtccggtcgtcgtgattgccggcaaccatgataatccggaccgcctttccgcggcctctccgttaacgacagaccatggcatccacttgatcgggtacccgaagactgagccagttgaaatagaagtcgcttctagtggggagatcctgtcagtcgcagcgctcgcctatccttccgagtccagactgaatgaagtgctgtcggaaacatttgacgaaaaactgctgcgcgaccagtatgatgagaaaatcaagcagacctttcagcgtatgtgcggcaaggcgagaaaggatgcggtgcagattgcggcaagccatatttatgtggcgggcggcagccagacggattctgagcggccgatcgaagtcggaggcgcatatacggtggctgcggaaagcctgccggaaaacgccgcctatgtggcgctcgggcatcttcatcgcccgcagacgatcaaacgggcccgcacgcttgccagatattcaggttcaccgcttgcctacagcttttctgaagcgggatacgcaaaatcggtctccattgtcgaagccgcacccggtcaaacggcatcatgggaagaggtccatttgacgagtggaaaaccgctcgttaaatggaaggcggaaaaagggatgtcccaagtatacagctggctggaggaagagcgggacaaaaacgcgtggatcgaccttgaaatccatctgacagaccagctgtcgattgaagaaattcaccgtttgagaaaagcgcatcaaggcatcatccatattcgtccggtttttgaggaagccgcctcggatgaagagaagatccggtccagaaacgttccgattgaagaacggtttatagcgttttatgaaagacaaaccggtggagcggttcccgatgaggaaaccgtcaaactgtttctggagctcgccgcaggatcggaacaggaagagggtgatgaaacatgaagccgatttctctgtctattaaggggctgcacagtttcaggcaggagcaggtgatcgattttgagcgcctgtgcgatgccggtgtattcggtatcttcgggccgaccggaagcggcaagtcgtcgattcttgacgcgatgactctcgctttgtacgggaaggtggagcgggccgccaataatacgcacggtattttgaatcatgccgaagatgagcttgccgtatcgtttacgtttaagctgcagacaggccatgagacggcttataaagtggaacgggtctttaagcggacagatgccgtcaaggtcaaaacatcgatctgccgcttcattgaaatgaaagaggaacaaatcgttctggccgataaagcgaatgaagtaaaccggaaaatcgaagagctgctgggcttgacgatcgacgattttacaagggcagtcgtcctgccgcaaggtaaattcgccgaatttctttccttaaaaggagcggagcggcggcagatgcttcagcgcctgttcaaccttgaacaatacggggacaggctcgtcaaaaaactaaagaaacaggcgcaaacagctcagtccagaaaaaacgagatgcttgccgagcaggctggattgggcgatgcgggggaagaggcgctgaagctggcggaacagcatctcgaagaagccgaaacccttttgcaaagcaagaggcgcgaacgagatgcggaagcgcagcgctttgcggagtaccaggaaatttggaatctgcagcaagaaaaagaaagctatctaaaaaaagaggcggagcttttaaagaaaaaggaacagatccgggaaaaagaaagccgcctgcatctcgctgaaacggcaaatacgctcaagccttatgcagacgcctttctggcagcgcgggaagatgccgagcgcgcacttcgggaagaaaaacaagcgcgggaacaattagaacaatacgaagagcttcataaaaaaacagagtgcgagtacgagaatttcaggcgtcataaaaatgaaaaagaaccggagcttctcaagcaagaagaacagctcaccgctttgaaggaaattgaaaacaagcggcttgccgcacaggcagaagctgagaaaaagcagcgggaacagcgcttgaaagaagaggaaatcaagcatgcggcagacgaactggccaaggtgaaaagcctgcttgaacgcgggacagccaagcaaaatcagctgaaagcggagctgaaatctgtccaggtatccagcgaagagcgcaaaaactgccggaaggccaatcagcttgcttttcacattcagcagcttaacagcgatgccgctttagaaaaaaaacggctcgatcagcaggaggcgctgatcaaagagctccggcaagaacagcaagcggtggatcagaaggtgaaggatgaaaccgaacgcatcgaggcattgtttgccgctgtcgaacgagcgtatgcgctcgtttgcgaaacggacagatcgctctctgagaccgtccgtctcgcgactcaaaagaaagaagagattgtcgcaaaacggaaacaggcaaaccgtgatcagctggcaatcgaactggcaaagcagctcaaagagggtgagccttgtccggtctgcgggtctgtacatcatgaaatgcccgcgggtgtcggtacggaaagcccgtcctttaaagagacggaatccgaactggagaaaacggaagccatcatcgcagaagccggcgcgctggctcaggagtttctctcagccaaagtggcgctcgaacagcagtccggccacctgatgagcgaatgcccgtttttagtcaaaagcaaacacgaactgcctgaaactgctgcatcgctagaagaaggcaccattcccgaacggttcagccgcatcagctttgaatggaaaggaatcagacaggatctcgccgagacaaaaagccggatgtcaaagctccttcacacatataaagagctctgcaaaaaacgcgaccaaatcagcgaacgcctcagccatgaagaaaaagagcaaaacaggcttcaaaaccgcgtccgcgaattgaatgacgagttaaatgaacgccaaaaaagcttcggcgaacaattcggcggcctctcttatgaacaggctgaaaaatggcaaaaaacgattgaagaaaaagatctggccgcagaggaattcgaaaagcgaatcgaaacgagcgtcgaatttctcacggaacatgaacagcaaaaagagaagctcaccgagcgcttgtttgcgcttgataaagaaaagcttgaccttcattatgcggtcgaaagcctcaaaaaagacataaacgattatcaaaaagagctgacgggctatcccgatacagctgctatcgacgaaaagcttcaagacgtgaaaacgcagttggccaagctgcatgagcaggaacagacgctttacggacggctcaaggagaccgaatccgaagtcagccgtttaagaggacagactaaagggtgtgagctcgctttgcgcgaagcggaagcaaggcttgcgaaagcggcggacatctggcaggaaaaagccggaggcacaccgttcgaaaaggcctctgaagtgaaagcgagcattttggaccgcgatgagctttcccggctgaaagaagacattcaactgtattgggatcacacaaagcagtgcgagtccaatatcaagcgaattacggaaaagcttgacggcagatctgtttctgaagagaattgggaaaaagccgcagtcacgaaggaccaggcggaggaggcattcagcaaagctctagaggaaaggggagcggccggcaaagctctcgccgtcatccgcgagaaccataaaaggtttaaggagcttgaaacatcgttggctgaatggcagacatacatcgaccgccttgataagctccaagccgtctttaaaggaaacagctttgttgaatacttggcagaagagcagcttgaaagcgtcacaagagacgcatctgcaagactcggagaactgacaaggcagcggtatgcaattgaagtcgactcagaaggcggctttgtgatgagggacgatgccaacggcggagtcaagcgccctgttacgagtctgtcaggcggggagacatttctgacttcgcttgcgctggcgcttgcactctcggcgcagattcagcttcgcggagagtatccgctccaattcttctttttggacgaaggatttggcacgctggatcaggatttgctggatacggtcgtgactgcattggagaagcttcagtctgacaatctgtcggtcggtgtgatcagccacgttcaggaacttcgggccaggctgccgaagaagctgattgtccatccggctgaaccgagcggcaaaggcacagctgtatcgcttgaaatgatttaacctggtaaccaaaaagcagccttcttctagtggaagaggctgctttatgcatttccgacaacattctggtcgcttacatccgggtctatataatttgtcgcgtttataccattgttgacgataaggaaatctccagtattaccagcaccagaaccgagtgcagactttgaagagctttttggagatagataaaaagaatcgccgaaattcactactcctcctgagatttcattgattttaatgggtccgacaatggctggcatgattgatcgacatcctttatagaagtctctgaaccagtatatgtcggccgggcggttattgtgagttccttgcaggaggaagctttctgatatgtttgactctcgcctcggaaatcatgcggcgcgtcgaaccaacctgaaaaactgaagaagaagataccccggcaatttttacagctctgactcgaatgacgggaacctcatggaaaaaagctgatgagacgccggtttccggtaataaatgtggtatcggctgctgaaagagagggaaatcttcctgattaaatgagccttcatttccgaaaaaaagtgaaaggtagcgctgaacagcgagaattttcactttaggaataatctcttcgacatccccgatttgcagcgtgctggtgatccctactgaatgaactttcataaactttacttttgacgttctgatcatcttgattccggcgccagcgggacaaacggcccgacaatgagagattcaggcggtgtatcaaaaattgatgacagggaaatgcattctgtatctccgattaaaaaaacagatgagcttgaaactgcggtaatattaatattgcctacatcgaaacagcggttcacaacggtaaaattcattcgttttcatttcctttcatttcgtcaggaatcgatttgagaaagtgttcgattgcccgcgcgatatcacgcttcacataatcggccagccgttctgcatgctcgcgggactggatgttttcgtcaggctgcacatgtttgacgtaatagcggatgcggctgtcgatttgctttctgatgtcttcgatgatatggtggcggtttgtatcgtccagtttactgtcataccggtcttccagctgttccagcaaacgaggggtctcttcgtttaaataggcatcgacaagctgtctcgtttgctgcatcagctggctgtcaagctcctgctgaagcattccgatacccggcggctgttggctgatttcaaagttttcgacattatccgggtccgcaggattgagtccgatatttagcgttccgtccaagcgttcaatttttagttgatcaaatttgtattcgatccggtcgatccgggtgccgggattttctttcagctggttcaactccgaatgcaatacggcaatctgactttcgagcctctggatttgcgcagcctgctgctgcaaatacacataccagttctgtggattgctttgtttcatgagattacacccccgtatatctatggtactgtaacagaaggagcgtgaagaggaacgagagtcggttgagtcccatctccaaaagcgtcgtcaaagacttcgccggttaccggaggtgcgggttctgtgtagcttccggtattgtacaggttggcaagtgttttgattgaaccggcgcttccaatctgcaatacggaagagttgctgattccttcaactcttaaataattgatttgtattgtttgattgatataaaagttcatgccttcactccctacaggttgcctgcgaccggctgatcgattacatcgttgtcatatgtgttggtgatgctgttctggttgtatactctgagtccgtctccggtattgaagctgccggcacccgcaaatgttttaacttctgcataaggagaaatcgtgatgcagtctccgacatgaacaacgccgctcgtaccgacggcatttactttaaaagctccgacaatagctggcatgatggcacaccctttaattgatcaaacatttttttatgggctatacaccatatcctatgttgattaggcgcttttgtgattaaaaatgaggttcttccgtgagtgcagatcacatactggtgaaactaataagatgagaaaacgtatgaagaaggaaaacgtgcgataaggggagagacgtatgtattttcaattgaatccgatatcaatcgctgcagccctgctgttctttgcggccgcatatgcagtcggaataaaaaagcaaacctggatattgcgggggtttcgccgggaaagggtaagggatcaggataagctggcgaaaatcgctgggtatttctttttgaacagcggatttttgttatttttaaatggggttgtttacatcccgtatcaagagtcttttacaccttcagccattcttgcctactgtatttgcacgatgatttatgttcaaaaaacaatggccgaatagcccaagctgcgacccgaaatcaacggatgatgaaatggaggaggaaggaggccggcatcaggcgcagcttgcagtcggaggtcatgacgtgtggcggccttttctttcttccgcatgcacgcagttatcatccttttgcattctttgattcagcaagttgtccaattcctgactgcatcgaatggcctctttggagttgatgccgaacttttcggcagcttcaaataaggccagtctttttgcttcaattttattgttcatcatggcagtctccaactttcgatttgtattttgagtcggtaatttcaggtattcagcgcattgatgtccttgatattgctagtataccttattttgtgtaaaagggatttttttcgccaatatgacaaaaaatgtgacatttttttcggaggacagcgacagtctattatcgggaaagctcgaaaagcaggaaccgcttcctctgatcgatgaaatgaaaaatttgtttttgctcatcttcgagccggctgtatgtgacggttgtataaggatcatgttcaagaaaaggcgcgattgtctcgtgccagtttaccgcataccgcgaaagccggctgattgtaaattggcggtgcaagacatttttcattaaattaaagtattgggattgaaaagccgggatgtcgagcagccttgcagacagcgtattatagcctttcgccggaatccggttgtgctccatttcttccccgtgaatattccgtccccatgtcgcgtcataatcccatggaatgatttgaaacgtttttgtgcgaccgtttaaataaagcgcgtaattatggacaaagccgtcgaaattttgggtgtagacggcgccgatgagccacagcaaatattgtttgacatcgagatagcgtttgatttctttttcaaatatgtcgtctttggcggtattgataaagtagataaactcctggaggtagtcatcgtggcggcttgaacccgtttttctttcgtatccctgcatgagattttgcttagcctttttattgaaggaactcagcagagaaaaattagcatcgtcatcaacggcataataaatggcccccctttctaaatttctcctctttaagaaatgatcgtcaacagattcgatttttaaatagatgccttcttttttttcattgatataaaggaaaacgtgtgatgctgctggcgcaaggacgccgatttgttcaaaaaaatgaaaggaaagcctgtttctgatgaaagacggatcatgatattccgcgttcaaatgaaacgcagccttttctttattgtccggatattgaatgaaataggattttttcgtcagtttgcgggtgtgggcccctctgtatgacactgcgacaggcgtctttgctgaaccggtcaagagcatgccgggaacggcttcatcactccagacgtcttttttcaactcaagcagatgcttcggatgaatgtgcagcctaaaggccggcaaggcagtggcactcatcatcatttcctcctttttcagctgacatatcatatgtgaaaaaaacctgtcccggaagcagaccgcctaagtttgaacaaaaacagtcatttgcctcagtacacttgtctttacggcgcgtatgataaatcaggacataaaaaaggaagaacaggaggttacaagatgagtggtgtccatgatcatgacattaaaaaggcagtagaccagctgaagagcgaaggcagagaccattatttagaccgggaacccgaagaatacgccggctcgggaaaagagcggcgtccgcataacatttgggatctttggtggggaataaagccggacagaagcaaaaaacatcataaaagcaagaagcatgacgactatgaaaagccggataaaagcaaaaagcccgacaaaagcaagaaacccgatgactgcaaaaagcctgacaaaagcaagaaaccagacgactgtaagaagcctgacaaaagcaaaaaacatcacgactgcaaaaaacgcgacaaatgcggccgcaaacgccccgaccatcatcgctgcaagaagactcaccatcataaaagaggcggctatgaaaccattacaaaatggtctgacggaaatctgaccgaggtcatctaccggaaaaaataagaaaagcggcttgctgcatggtgagccgccattttcttttccgggaaggaacgcccgggactttagaagcggttttctgaaagaggaaaggaattttcgtttttttagagaatatgtagaatagctttaaatcatactgcgggggaatatttatgaagtttgcgacagcaaagctgcacagccgtacatttgtagggcttgtcatggatgagaagataatggatttgcaaaaggcggaaaaaaagctgtttgagcttgaaacgatacctgaaacgcttatcgaatgcgtaagcgagggagagaagtttgtccgccatgtcgaacagctagtggaatggtcaaagaagaaaaacagcgaagagagcggttcgtatatttatccgctgtcagacgtcgatttgcttgcaccgattcccgaaccgcggaaaaatgtgatctgcatcggaaaaaattatcgggatcatgcgattgaaatgggaagtgaagcagatattcccgaacatatcatggtgtttacaaaagcgccgacttcggtcatcggccacatggaagggattgatgcccacgaaggcgtgacagaggcgctcgattatgaaggcgagctcgcggttgtcatcggcaaaacgggaaaaaacatcccgaaagctgaagcgctcgactatgtgttcggctatacgatcattaacgatgtgacggcgcgcgatctgcaaaagaggcacaagcagttttttatcggcaaaagccttgatgcgacctgcccgatggggccgtttcttgtacataaatcaatgattgaagaccccggtgacctgaaggtggagacgagagtgaacggcgaactccgccagtcggggagcacaaaggacatgatttttccgattgcggaaatgatcgaaacgctgtccaaaggaatgacgcttgaagcgggggatattatcgcaaccggtacgccgtcaggagtcggcaaaggctttaatccgccgaagttcctccgaaaaggcgatcaggtcgacattacgatcgaaccgatcggaacgctttccaatccagttaaataaaggattgtcaaaaggatggctttagcatataatgaagctgtcaaattttttagaaatgagggatgtgtgatgagaatggatattgtcttttttgcccaacaaacgatcattgcacagcccatgtaatatttcgactggtattcttcaaatggatctggtgatatttccatgggctgtgaaccggctcatggagtgtttatatgttgaaagagccgtgtatttgcggctctttttttaatcaatcatcagatctttaggaggaaaccgaattgaatttatcagcattaggcatcaaatatatcatggaagctttaaaggatgaggaaggtctggttttgggaaggatcgcccttgagcataaaaggttgtaccgggtatggacggaagaaggtcagtggcttgccgaaatctccggcaggctgcggtttgaagtggaaagccgcggagactaccccgctgtcggcgattgggtgtatatgcgcccacgcggcggcgaaaagaagggaatcatcacggaggtcgttccccgattcagcaaattttcgcgcaaagcggcgggtgagccggcggaggaacagatcaccgcagcaaacgtcaatacgatctttctcgtcaatgcgctcggtctggattttaatgtgagaagaatcgaacgctacttgctgctggcatgggaaagcggagccaatcccgtcatcgtcttaagcaaagcggacattgctgaccggattgaagaaaaggtgcgccaggcggagtccgtggcattcggggtgccgattcacgtcatcagcgctcatgaaggcagtgggatggatgagctgaaagcgtatgtgaaacaaggggaaaccgtcgcccttttagggtcgtcaggcgtcggaaaatcaacgatcatcaacttttttctgaaggaagacaggcaagccgtccaatccgttcgtgaagatgatgacaaagggcggcatacgacgacgcacagggagatgtttatgctgcctgaaggcgggcttttaatcgatacgccggggatgcgggccttagagctttgggaatcggaagaaggattcagacagagcttcagcgatattgaccagcttgcaaaaaactgccgattttcagactgcatgcatcaaacagaacccggctgctccgtgcaggaggcgctggctgacggcagactcgatgccggccggttccaaagctacctgaaattaaaaaaagagctcgaatacctcgaaagaaaaacggataaacgggcggcgcagcaggaaaaaaagcggtggaaacagataacgaaaagcatgaaaaagaacaaaaacaaataaatgaaaaaggcgctgataaatggcttcagcgtctttttgctgcggaaatgacagcgttcacattgttttgtttaatggaccggttcatgataagataagaacgatacctgatttgatagggggaaaaatgaatatgacgcatatgcatatcacgtcttgggtgatcgcgctcattttagtgttcgttgcttacggactttactcatctggaaacagcaaaggcgcaaaaattacacatatgattctccgcttattctatattatcgttatcattaccggggcgcagctctttttaaagttcacggcatggaacggagaatacatagcgaaggccttgctcggcctcatcaccatcggattcatggaaatgctattaatccgcaggaaaaacggaaaagcggccactgggatctggatcggctttattgtcgttctgctcttgacggttgtgcttggactccggcttccgctgggctttaaagtgttttaattaaatgacatcggttctttatgaggactggtgtcttttttatgtcggcggcttgaatgttgaaatcataacgattcgttccccatctgaagcggtccattcaaatctgtccttccactcctcttttctttcgtaatgatgctgcagggcgcattgtttcatatcatgagaaaactgataaaacgaaacgcccttgacatcctttttctcgggccaaaagctcaggccgttataggcgaagacgcagtcaaagacggaaaagccgaggctgttcagctgatccaaaaaagaatagaactgtccgtcttccagatcgttcaaaaattcgagaaatgcctgttttaccgttttcagataacggatcggttctcctcctgtcagcttcacggtctccggtttttccgttacggcgaattgatcaaacagttcggctttttgccattctccgtctatgctgatgaaaactccggggctgttcaggctttcaaccaaaagcaaatctccttcttcattttcaatcaggcagatcccgtcttccattaaaattttgccgtaaatccatttgcgcttttcggcataaagtcgtttctggcgttcggtgtccatgggcggtctcctttcttatttcgttttttccaaaacgggcttgtctcatacaagactctgttggacaattcaactattattttaaggtgcataaaataggtaaagtgacaaaggaagtgaagcctaaagcagaggaagtacattagaattggagctgatcgacaatgtgtggaataacggggtgggtcgattttaagaagccgcttgtccgagagcagtcaatcatggagaagatgactgatacgctttcgaaaagaggacctgatgatacgaatatttggggaaagcgccatgttttattcggacataaacgcttggcagttgtggatctggaaggcggcagacagccgatgacccgcacacatcaaggatatgattatacgatttgctataatggcgagctctataatacggaggatttgcgaaaagagcttaggcggcgggggcatcaattcaagagccactcagatacagaggttttgcttcattcatacatggaatggaaagaggaatgcatcgacaggctgaacggaatttttgcatttgcggtatgggatgaaaagcgggatcttctttttgcggcacgcgaccggcttggtgttaaaccgttcttttacaccgaacagggctcatcatttttgttcggatctgaaatcaaagccatcctcgctcatcctgaagtgaaagcaaaggtagaccgttcagggctggcagaaattttcggcctcggcccgtcacgatcgccggggagcggtgtttttaaaggagtaaaggagatccgcccggggcatgcgatgattttctcaaaagacggtttaacggtttggcgctactggaatgtgaaaagcgagaagcatacggacagctttgacgaaacggtggaaaatgtgcggtcgctgtttcaggacgccgttacaaggcagcttgtgtctgatgtgccggtatgtacgtttttatctggaggggtcgattcgagcgccattaccgcaacggccgccaagcatttcgagagagaagggaaggcgccccttcatacgttttcgatcgattatgaagacaatgagcaatattttacgtcaagctcatttcagccaaacgccgacggcccgtggattaaaaaaatgtccgatgcattcggaacggttcatcacaattgcgtgatatcccaggaggagctggctgcctatttggaagaagccgtactggttcgggatttgccggggatggctgatgtcgattcttccctgctatggttctgccgcgagattaaaaaagactttgtcgtgagcctttcaggggaatgcgcggacgaaattttcggcggctatccttggttccattcggcagaagatgtgaaaggtttcccatggatgagatcaatggaagaacggatcgcacttctgcaggacggctggcagaaaaagctgaacctcagcgaatatgtgaaggcaaaatatgaggaaacagttaaagaaacaccgctgctggaaggagaaacgggtgcggagaaacgaaggagagagctgttttacttaaatatgctctggtttatgacaacgctcttggatcgaaaagacagaatgagcatgggtgcgagcctcgaggtcagggttccgtttgcagatcacaggcttgtcgagtatgtctggaatattccatgggatgtcaaaatgcatggcagccgtgaaaaaggcatcttccgcaaggcgctggaaggcattttgcctgatgaagtgctgtaccgcaaaaaaagcccatatccgaaaacgcaccacccggcctatacgaaagccgtgatacgctggctggagtcattgctggagcaaaaagactcggcgctctatgctttcttagaaaagaaaaaactggagcggctgattgagacggaaggtgcatcatttcaagttccgtggtacggacaattgatgaagggaccgcagctgatcgcccaccttgcccaaatccatacttggtttgaaagttatcgaattgatatcgaggaataacataaaacacccggcatatgccgggtgttctgcgttttggcagctaagctataaagaaacggcggcgtttattttgaacaccgccgatttctatgatcagcaagccggcctgagagccggatgcatgagagtcacacctgttcagttttggaagaaggtccaggctttaaattgttgagccgtgagacaagatccgttccgaaagcggagcttacgtcaacatcgtcctgatcgatgtagctttctttatactcgtacgcggaagaaccgtgttcggcataatctagtccggaaatttcctcctcttttgataccctgatcggagcgagggctttcattgccgcggcgacagcgtatgtggcagcgagggtccaggccgcgatcgacaaaatgccgacggcttgaatgccaagctgtgcggctcctcctccgtaaaagagaccgctcgatgtattgaaaagcccgactgcaagcgtcccccaaacaccgcaaataccgtgaacggcaagggcgccgacgggatcgtcaagcttcagcacctggtcgataaactgaacgccgacaactaaaatgacaccggcgatgaatccgatcaatatcgagcctgtaaatgaaacgccgtccgcgcccgcggtaattccgacaaggccgcctagcgcgccgttcagcgtcagggaaggatcgatcctgccgtagcggaaataagtgaacagcgccgagctgacgactccgcccgatgccgctaaaagggttgtggtgatgacgtgcgggacggcggcgggatcagccgcaagcgtgcttccgccgttgaacccaaaccagccgaaccacaggataaagacgccgagagcgcccagcggaatgctgtgccctggaatggcgttgaccttgccgtttgtatattttccgatccgcggcccgagaaacatgacagccgcaactgcgcccgcagcgcctgtcaagtgaacgattgaagatccggcaaaatcgacaaatccgaggtcgtacagccagccttccccccaagtccaatggccgacaaccggatagatgagaccggtcataaacagcgtcaagatcatgtagctgccaagcttcatccgttcagcgacagcgccggaaataatggtggcgcacgtagcggcaaacacggcctgaaagacgaaaaatccgacatcctgatcacccgctagagcaaaaccgcttgtgccgatgaacccgccggcgctgtccccgaacatgaacgcgtatccggcgaagaaataaaggatggagccgatagagatcgtcaggaagtttttcattaaaatgtttaacgtgtttttagctcttgtaaagcctgattcaaccatcgcaaaaccggcgtgcataaaaaagacgagcagagtgccgatggctacccatgtcatgttgaccgagtcattgaccgattgcaccgtcggttcggcggccagagctgatgctgcgaggaaaaaactgaggaacaggacggcagataccttggttttcataagaatcaccctttcttaaagtatcgactaaaagagagcaggagggaatcggtcgttttagacaatcgcttcctttcctgattcccctgtccggattcggatcgcgttttcaattggaaggacaaagatttttccgtcgccgaccgtatttgtcgaacatgtgctttcgatttgataatttcatcaacgctctccgattcaatcaccatttcgactttcactttaggcagcagcttgatttcgtaggaggtgccgcgaaacagagcctgcttcccccgctgctggccgcagccggcaacctctgagacggttaatccgtttatgccaacctcttcaagctttttgcggaggcgggggaactgttcggggcgtataatcgtttcgatttttttcacaatgcaaatcctccttttggtgtaaggttatattacgtttgttgttatgtttcttatcatacgtaaaagtaaattgaaaatcaatacgaattttcaaaaaaattaatctattagacctattctttgagaggtctgtgttcatagaatggcagtctcgttaagttttataacatgaaaaaacctgctttcaactgaaagcaggttatgctgcaaatcctttttgaagccacattttagatctccatcttctgtacattaaaattcccctgacccattcgtcggcgatgaaggaaaaccaaattcccgccaggccgaatccgagctgaatgccgaaaatgtaagcgatcggaagtccgattccccacatcgagacaatcgccatataaaccggatatttcgcgtctcccgcagctctgagagaattaatgatgaccacgttaaacgagcggccgggctccaagataatcgtcaaaaggatcagtatactggccgttgcgataatatcgggattgctgctgaaaatgccgatcagctgttttgaaaacacagcgaagagaacggaagtaaatgttgtaatggccagagcccaccacaggcttttcaggcagcggctgtatgcttcatcaaattgcttcgcgccgatatggcgtccgattaagatttgcgttccctggctgatcgctgtgccgaaaagcatgataaacatcatcaaattttgggtatagacttttgttgtcagcgcctgcgcgcccatcagcgtgataaaataggtgacaatcatctgtgacgcgttatatgacagctgctcccctgctgaaggaatcccgattttcagcagttttttcaggtgacttttctttaagacaaacagccgtttggacaacagcggcatgccgacgcgctttttgacgagcagagcgatcgccaaaaggccgatgatgcgcgcgattgaagtggacattgccacgccggccacgcctaaaaccggaaagccgaacggtccgaatatgacaagatagttgccggcgatgttcaggatattcatgccgatggttacaaccattgtgtcctttgtatacccgtagcttttcaaaatggcgctgaacgtcataatgagcgcttggacaaaggacagtccgccgacgatctggagaaagatgccggcttcagcaagcaggttggcggaaaggcccatcatcaataaaagcggtttggcaaatatataaatcgccgcactgatgaatagactgatgataaaattggcgctgatggaaacatagccgacttccattgcttcggctttttgccgcgcccctaaaaattgagaaataatgacggttgttcctgttgcgataaaaccgaacatcacaatgatcaagttcagcatttggttgctgacgccgacggctgccacgctgtcgtcggaatattggctgagcatcagggtatctgcgttgcccattaacatatataatgaaacctcgataaagataggccaagtcaatgcgaataaagagaggttttgaggtgctgtttttttcatggcgtttgacccctttcttttaaaattccgttttatagtgtaacgccattttcttataataagaagagacgaaaccgatacttcttggagaaatccgacttgatgaaaaaggggagagaacatggaacatatcatctttacaattccgccgctccctgtgttgattaccggcggagaagggctgttcaaaagaggggaaaagcatgtgaggcgtgaatattccgtgtttgatctcttatatgtgatacagggggaactatttttgactgaggacggcgagccccatcagatccgggaaggggaatacatcatccttattccggggctcgagcattatggccaccgcggctgtcaagacgatacccgctatttttggctgcactttcaggagccgtcctatggcttcgcgcagcagggaggtgagaactggactgaactcaagctgaggaaggggacatttgaaacgccgacattgtatcatttaaagattccgagaaagggaaagatcgaccaaaaagcgtttatcgaacagcagtttaggcgtttgattgacgattccgcccaaaattccgacctgccgcttcgcaggcagctcttgttcgaagagctgctgattcacttgcagaaggaggcgttccatattccttcggcgagtgagcgtgtagcatccgaagcacagcattacatcgaccgccattataaggagaagctcagcatggagcagctctcggctgcccttcattatcaccaggactacattacccgctgcatgcaaaaggtgtttggcatcacaccgggccaatatgccaataaggcgaaagtttttgaagcgaagcggctcctctcttctacaaacgacaaaatgtcatcgattgccgaacaagtcggaatcgatgatccgacctatttctcaaagctgtttaaacaaatagaagggatttcgcccgttgaatacagaaagatgatgaagcgaaatattgagtgatattttcaaagcataggaggagataagtttggcatccatcaatggtgaaaaagtgaaattgcgtacgatcacaatggatgacctgcccggattatggagaatgatttacggaactaaaaaccctgaatggaaaaaatgggatgccccttattttccgcttcagcccgaaccgtttcaatactttatcgattcttttgtgccggctttaaaagaaaaaccgccgcgctatttggcgatagagatcggcggagagctgaaaggaaccgtttcttactattgggaatcccggccgacacgctggctggaatgcgggatcggcatctatgatccgcggttttggaacgggggatacggtacggaagccgtagaattatggatcggcttcctgtttgaaaacgtcgatgtgccgagaatcggaatgacgacgtggtcaggcaacaggcggatgatgaggtgcgccgaaaaagccggatttaagatggaaggccggattcgcaaagtcagatattatgacggagtctattacgattcaatcagatacggaatcctgcgggaggagtgggagctgatttgccgcggaagctgacacgctctataatataatattagaaatctttcatcagcggactagaggggaccaatatgaaaaaaaccatttatgatgtagcggaagcggccggcgtttcgatttccacggtttcccgggtgatcaacaataccgggaggatcagcaggtcgacaaggcaaagagtgcatgccgtcatgaaagagctcgattaccagccgaatgttcacgcttctgcgcttaccggaaagcgcacgaacattatcggcctgttgacgcccgatattgcaaacccgtttttcggcgagcttgccaaaagtgttgaagagcgggcgggcgagctcggcttcagcattatgatgtgcagtaccgaccgcgatccgaaaaaggagacaacgtatttctcggtcctcaagcaaaaaagcgtcgacggcatcatttttgcgacaggcatcgaaaatcaggagacgatggatgcgctcgaggatattgccaaagagggcataccgctcgtgatgatttcccaggatcgcgcccttgttccgatggatgtcgtggtcatcgatgattttatgggcggatatttagcgacgcggcatttaatttcgctcggtcataagacaatcgcctgcatcgccggcgacggatcgacaaccggagaaaaagacaggctgaaaggcttcaaaaaagcgatggatgaagcaggcatcaaagcggatgaaacgctcatcgccggatccggtttttccctggaatgcggcaaaaaagcggccgctcagattttcaaaagcaatattccgaccgccgtttttgccatgaatgatgtgctcgcgtgcggagtcattcagactgcaagggaatgggggctccatgttccaacggatttatcggtcatcggctttgataatacgtttttagccgaaatgaccgatccgccgcttacgacagtgtctcagccgattgaagaaatgggccgccgcgcggccgagctgcttgccgaagaaatcagcggcaagaaaagctcgaaaagcaaaatcattctcacgcctgaacttgtcgtcagacagtcgacggcccctccatttaaaaaagaagcacatgccgaaaagagcgggttttgatagaaaaacgctcttttttcgtttctaaagagcaagcgcttgaccaaattaattcctaaaaaacaattgcggataaaataaatacagggtaaaatcagaattgaaatgagcaagcgctttctctaattaataaagcgctttcatgaaacgcaaaggaggagaagaaaatgacagaagttgtgagatgcgccgtattggggcttggaaggctcggctattaccatgcgaaaaacctcaaaaccgaggtgcccggagtcctgctcgccgctgtagccgatccggcagagggaagtgcgagggaggttgcagctgaactgggtgttgaaaagtggtttgaagacccgtttgagtgcctccgcgatccggaaattgatgccgttgtcatcgttacaccgacatccactcatgccgaaatgatcaaacaggcagccgaattcggcaaacagatttttgtggagaagccgctgacattaaatcttgaagagtcaatagaagtcatttccaaggtcaaagaaatgggcgtgatttgccaggtggggtttatgaggcggtttgatcctgcttatgcggatgccaaaagaaggatcgatgccggagagatcggcaaaccgatctattataaagggtttacgcgcgattttggctctcctccggccgaattcatcaaaaaaagcggcggtattttcgtcgattgttcgattcatgactatgacatcgctcgttatttaatgggggctgaaatcactgcggtttccggccacggaagggttttgaagcacgcattcatgccgggatgccatgacgtcgatcaggcgctcacctatatggagtttgattcgggagcggcgggtgatgcggaagcaagccgcaattcgtcttacggccacgatatccgcgccgaaatcatcggaacggacggcagcatcttcatcgggatgctgcggaacccggcggttacagtgcggaccggaaaggggagcagctataatatcattcccgatttccaggcgaggttccatgaagcgtactgtttggagctgcagcattttgctgattgtgttcgcatcaaaacgaaaccgcttgtgactgaagtggatgcggcggtcaatcttgaaatcgcgcttgcggccacacaatcctggtcaacaggcaggcccgtcaagattcagtatcagacgaaaaagcttacggtatgaaacgggggccaccctgagcgggctgttgagatgatcctgcggtcacaaaggaacaacaggaaggagggcgtaaggaagcgttccccgcccggtgccgcctttctccatgcgttttcaattttgcgggcttcccatggatgccggaggattagacccgtccgtcattccggcggtaaaaaaacggcatggcgccgatttgttgtacacgattccgtcatttcacaatccgacgggcaaactgatgtccgaagaccggaagcgcgagctgattcaaatcagcaagcagctgtcgctcccggttattgaagatgacgcatatggcgatttgcagcttgacggcccgccgtcgtcgccgctgaaggccatggacagagaaggcagcattctttatgtcggcacattatcgaaaaccgtcagtcccggcctccgcatcggctgggtcgcaggtccggagcccgtcatcgagaggctggccgatattaaaatgcagactgactacggatcaagttcattgtcgcaatgggcggctgcaaagtggctttcaagcgggctctatgatgaaaatctcagccggattaaagtcgaactgagacaaaggcgggatgaagcgctccggtgtcttgagacctattgcagaggaatcgcccgctgggaaaagccctcaggcggattttacatttgggtcacattcctaaaaccgctctcgctcagcgctttgttcgaacaagcattacagaaaaacatcctcatcaatcccggcaccctctacgataaggaagccaaatacagcatcagattgtcctattcgtacgcctctttgacagagcttcgctacggcattcaaacaatcgcagaactcgccggtaagctcatgtgaaccccgctgtaccggctgctgaaaaagcgacgttcagcagccgctccgctttttatttcaggcctcaggttatttaaaaacagtccataaaattccattaatatatcattcaaggaactattgattcatattagcagatgaatgtgcagaagtggaaatattcaagttgcctcgttatgagaaacgtcctatttttctgaatcttattgacatgccggtgtcacaaaatatacactttttttgtaattgaaaatgataatctttatcaattggagggatgctttctatgcctgtacaaacgagttctaaaaatcaagtgtttttggagcagcaaaatagaagagaatctaatgcgcgttcatatccgagaagatttccgctcgccatgcagacagcggaaggcgtcttggtgactgatgcggatggaaagcaatattatgactgtctggcaggagcggggacgcttgcgcttggtcataatcatccagttgtgattgaagcgattcaaaaaatgattgaggaaaaacgcccgctgcacacccttgatattacttcggaaatcaaagaggagtttgtcaacgaagtatttgcaagccttcctgaggcgtttgccaaacgggcgaagatacagttttgcggtccgaccggcggcgatgcgatcgaagccgctctcaagcttgtcaaaacggcgactgggaaaagaaccatcctatcgtttcacggcgcctaccatggagcaactcacggaacgatggcgctgagcgggaatttatctcctaaggaaaacgtccagggtctcatgcctgatgtgcatttcctgccatatccgtatgaataccgctgcccgtttggaaaaggaggagaggcgagccacaagctgtcgagcgcatatatcgaaaatatgctggatgatccggaaagcggagttttacagcctgcagggatgatctttgaagccgtacaaggagaaggaggctcagttccggcccgggctgaatggataagagaaatgagaaggattacaaaagaacgcggaatccctctgatcattgacgaggtgcagaccggcatcggcagaaccggcaaaatgtttgcgttcgagcacgccggcattataccggatgtcatcgtcctttcaaaagcgatcggcggaagccttcctctgtctgtcgtcatctatgatcaagaccttgatcagtggggacccggggcgcacatcggcacattcagagggaatcagatggcgatggcggccggaagtgcaactttaaaatatataaaagagcacgatgtgctatcacatgtagaaaaggtcggagcgaagctcatgcgggaattgcaagacattcaggagcacgttcccgaaatcggcgatgtccggggacgagggctgatgatcggcgccgaaattgtcgcaccgcataaaaagcaaaacgcaaacggcagctatccggctgatgcggagcttgcaagcacgattcaaagaaaatgctttgaaaaaggactgatcgttgaaacgggaggccgccacggaagcgtgatccgcttcttgccgccgcttatcgtaacagaggcgcaaatcgacgatatcatcacgatcttcagagaggccgtctatgaagcagtcaagtaaacaaaaaaactttgattccctgtttatgcacaacggggaacaggggatcaaagcataccgtgacgcggtagagaccgctgtagagacgctttgggccgattggaagaataaatcgaagccctacagcgggaagatgccgaaagaattggatctcgaaatcaaaagcttgttttcgtttcaggaagcgggagaatcgcttgcggatgttcttgagcatctgaaagaagcctatttgccgcaccggattcatgttgaagatccaaaatgcgccgcacacctgcactgtccgccgctgatcccggcgcttgctgcagagatgctgatcagcgtgctgaatcagtcgatggattcgtttgatcaaagcggagcggcttcattgatcgaggaagaaatggtgcagtggctttgccgaaagtttgaatacggaaaagatgctgacggaacatttacgagcggagggacacagtctaattacatggggcttcttttggcccgcgatgccttctgcgaaaagcagtggaactggaatgtacagaaggacggactgccgccggaagcgaacaggctgcggatcctctgttcaaaggatgctcattttaccgtgaaaaagtcggcttcccagctcggcctcggagagcgcgccgtcgtgcttgtcgataccgatgctgaaaagcggatgagcctttacgatttaaagcaaaaaaccgctatgctgaaggaatcgggcttacatccatttgcgattgtcgcaacatgcggaacgacggacttcggaagcatcgatccgctttccgagcttgcggatgccgcgcatgctggcgggctttggttccacgttgatgccgcatatggcggagcgttgattttgagcaggacccgccgctataaattggctgggatcgacagggccgattcaatcagcgtcgacttccacaagcagttttatcagccggtcagctgcggcgcttttcttgtaaaagacagaagacatttccgcttgattgattatcatgccgattatttaaatcctgaggaggatgaagcggagggaatcgttcatctcgtcaataaatcgattcagacgacgcggcgctttgacgccttaaagctgtttgtctcgctgcgtgtgcttggagaagatacattcgccgagatgatcgactggacattcgcattggctgaagcggcagcggaaaaaatctcagcaagcgatcggttcgaactgctgaatccgcaccctgaactgaacgctgtcgtcttccgctgcctcgcctcagaagacgacgcggagaacgaccgtttgaataaatgtatccacagagaattgttcagaacgggacaggcggtgatcgcaaagacggcagcagctgggaaaacatatttaaaattcacgctgctgaatccgcggacgacgctttcggatcttgatgacattctcgggaggattcaagagcttgcaagtctttatacgaatagcaggagggtaacaggatgagttcatttaaagaaatagcagaaaacgccacgattcaaagctttttaaattgctatttgcgtgaaaccggcatcgaaacccgtgagatcgcggacggctctcaaaaaacgctgattgtcccgctagagcgccagcagatcgagctgatcgttccgatcaagtactggtcgaagacgggaaggcaccttttctcatttccgctttattatcaaacagcccaaaacggaaagccgcttccactcgactatgtgacgctcgtctccctcgcttcaaaggaattgcttcttcagcaaagccgcgggggtgccgaggatgaattcatgctcagagtcattttgagctgccgaaatatcagccgttatgttgaggaacgagccgatgatcaaagtgagcttagccgtgctgattttacgtttatcgaagcggagcagtcgctcttgctcggccatctgatgcatccgacgccaaaaagcaggcaggggatgaagcctgaagaggaaagcatctattcgcctgaacttaaaggggagtttcagcttcattactttaaggcacacgcctccctcgttctgcacgactcaagtacaggaacaaaagcgccgctagtcattcaagaggaattgagaaacgacccgatgattgacaatgcgtggctggatgagcaaacggccgatccggattttgcgcttcttcccgcacatccgctccaggcgagagccttgttggaggagccgtatgtgcaaaaattgatcgctcaaggtctccttacatatctcggcgcaaaaggccggaagtatacggcgacatcctccgtccgcacggtctacagcaagcactcgcgctatatgtacaaattttcggtaccgatcaaaatcacgaattcgctgcgtgtgaacaagcagaaagaattggacagaggtgttgaaatggcccggctgcttcagacagagctcggccaaaggttgaaacaggagtttccgggctttcgcgtcatcacagatcctgcttacatttccattcgaggagagaacggggagtccggctttgaagtcgtgatcagggagaatccgttttatgaagacgaccgttcggcatgtctgatcgccgggctttgccaagatcacgcctacgggaaagagtcgcggctgtgctctgtcatccgcgggctggctttagaagaagggcggacgacggaagaagtgagcatcgattggtttgacaaatacttatcgatttcgcttgagccagttttatggctgtttgaaacatacgggctggcgattgaagcgcaccagcaaaacgccgtcatccgcttaaaaaacggctatccggagacattttactacagggacaaccaaggctattattacagcgaatcaaaagccgggattctttccaagctgatcgaaggcttgagcgaaaggagcgagacgatctgctcggacagcgtggctgtagagagactgcgctattatttcttcttcaaccatttgtttgggcttgtaaacgggtttggctgcgaagggctgatcggggaagaaacgctcctgtccatgatcagagagcggcttgaaaaagcggagcaaatttacggtatcacagagctgacggacagcctccttcgttttgcggagcttccgtgcaaggccaatctgctgacgagattttacgacatggatgagctgacaggctcgcttgaaacccagtctcgctatacgtctgtcaacaatccgcttttaaaggaggcggcggctgtccaatgaatgaacggatcacatttcaaaaagcggactatgaaagagacatatcgctcgtctaccgctggatgcaggaggagcatgtcattccgttttggcatttaaacatgccgtttgcaaaatttgaagcccattttcacaaggccatcacagaccctcaccaaacgctgtacatcggctttatcgacggtgtgccgatgagctactgggagtcgtactgggtcaagggagacatcattgaacaccactatgacaatgaaccttttgaccagggcatccacctgttgatcggtgaaaaagcgcatttgggtaaaggtcttgcccttccgctattaaaagcgatggtcaacatgcaatttgccgtgcctgaaacaaaaaaggtgatcgcagagccggatatccgcaacaaaaaaatgattcatgtttttgaaaaatgcgggtttcgccctattaaacctgtgaatctccctgataaaaccggattattgatgttttgcgaacgagaacgtttttttgaaaaggagaaaaaagatgaactctacaaagagacccaatgatgtatacgatgtcatcggcgtcggcatcgggccgtttaatctcggccttgccgcattggctgactccgtgcctgagatcaatgcgctgttttttgaacgaaacgaaagctttaactggcatcccggcatgctgattgaaggaacgacactgcaggtgccgtttttggccgacttggtgagcatggccgatgtgacaagcaaatacagctttttaaactatcttcagcagcataaccgtctttattctttttattttctggaagactttcatattccgagacaggaatacaaccactactgccgctgggtggcagaacagctcgacccgtgccgcttcgggatgaatgtcgaaagcatatcactcgttgaatcgaacccggaggcgctttttaaggtgcgggtcgcgaatcgggagaacggaggggaagcggtttattacacgaggcatattgcgcttggcattgggacgggcccgcacgttcccgatgcgctctcagacgctttggggggctcggtgttccattcagccgagtatttaaagagaaagcccggcggatttaaagggaaaagggtggccgtcgtcggctccgggcaaagcgcagccgaagtgttttatgacctggtcggtgaagatgaagcggagcatgtcagctggctcacccgctcaaaaggcttcttcccaatggaatattcgaacctcggactcgaatatttttcgcctgactatatcgattttttctatcagcttccgcagtggaaaaaagatgaattgctaacgcagcaggatcttctttataaaggaatcagcgcgaagacgatcagcgatatttatcatattctgtatgagcggacctgcggggggcggaaagcggcttttgatcttcagtccatgacagaagtcgagcagatcgaacagcgtggggaaacgctggttctatactgcacaaaccgggtgaatgaagaccggtttgagcggcaggcagatgtggtcgttctggcgacgggctataaagagaggctgccggaatgtctggcgcctgttgacagtttgattgaaaaggacgcgagcggccgctacgtgattacacgcgactacagactagtgacagctgcaaaatcaaaaaaccatatttttattcaaaacggagagctgcacacgcacggtgtcggtgcacctgacctgggactcggcgcttaccggaactcggtgatcatcaatcagctggccgggagagaagtatacaccgtcagccataaaacggtttttcagacattcggaacaggaatcgcggaaaaaacagctgtaccaaacggctaataaaggaggcattttcatgttgtttcaagatgaattaaagagggtcctcgatcctgacaggtggagagaagtcaatcggcgattgctggcgaagatgctttctgaatatatgtatgaggatatcattaagcccgatttcattgaaactgaagacggcatcaaccgctatgagctgagaacggccgaggataaggtgtaccggtttgccgccaaaccacgcatgtttgacagttttgacgcggtgccggagacgattgaagtcttcaagggcggacaatggacaaaacatgtgagcgcgattgaatttctcctggatattcagccgcatatcccgatgagtccggagacagcgggtcatttgatcaaggagttcaaccatacgatgctggctgatgcccaccttttggcaaaggatgcgcttacggctgacgagctgaccgaagccgattatgccgtaattgaaggcgagatgaccggccatccgtggatcgtctacaacaaaggaagaatcggttttggctatgatgactacctccggtttgccccggaaaatcagagagccaaacggctgctgtggatcgctgtacacaaagataccgcgtcatttcactcggttgaagggctcgattatgagacgctgattcataaagagcttgatgagctgactttaaggcaattcgctaaagtcatagaaaagcagggcgcagccagtgaagactattattatatgcccgtccacgaatggcagtggacaaatacgatcattcagcagtttcctgaagaaattgcttcaaaagcgatcattcctttaggggaaggcggagacgagtacctgccgcagcaatcgattaggacctttacaaacatcacaaacaaacacaagcatcatattaaactgccgatgagcattttaaatacgcttgtatacagaggcctgccgtcggaacgtacggttatcgcgccgaaaatcactgagcatatcaaagggatcgccgaaaacgacgcatttctaaaagacgaatgccgggtgatcctgccaggcgaaaatgccagtctgaacgttgaccaccaatactatcactctcttgaaaaagccccgtatcaatatttggaaatgctcggcgctattttcagagaaagcatttatacgtatttggaagaaggagaacggcctgttacgctcgcttctttaacatacattgatcaaggcggcgtgccgtttatcaggcgcctgatcgaaaagtcggggctgtcagcggaggagtggatcggaaagctgtttgacaccgtgatgccgccgcttctgcatttcatgtaccgctacggaaccgtattttcaccgcacggacaaaatacgattctcgtcttaaaagatcatcagccgcacaggctggcgattaaagattttgttgatgacgtcaatatcagcgaccagccgcttcctgaactgagcggtttgacaggggatttaaaagccgttctcagaagcgagccgccggaagggcttgtgcagtttatctttaccgggcttttcatttgccatttgcgctatgtagccaacattttagaaaatgacggtctgcttcctgaaaagcgtctgtggaaagctctggctgatgcgattcttgattatcagcaaaaattccctgaactgcgtgagcgcttcgaattgttcgacttattcaagccggaattgacgaagctctgcctcaacagaaaccggatggtcgactacggctacaaggacggcgatgaccgcccgcacgcctccgaattcggaaaagtgacaaatgcgcttgcgaaatttaaaaaagaggccgcaaagctgtaatgctaatgcggccgagaatgccccgcttccggcggggtttttttacgtcaatttcttatacatcaaaatatgaggtccgatcggcggtatgtcgtagacttcgccctgttcgctgaagccgagcttttcatagtagccgctcacagatgtcctggcattgcaccataaaaggtctgccccctttttccgaagaagctcttcggcatggcggatgagcgtgcttcccgctttttgctcacggtatccttcaagcgtcgccatccctctcagctgatactgttcttcgccttcaagctctgaatgttcggctttatgaaaggaagcgatgctgatcagcttgccccggtaatatccaccgaggtgaaacgcacccccgagcaaatcggtttcatacatacatgcttcaagcggctgattcggccggagaatgcggtgcctgatctcatacgtatcttccgcgtttattggtttgacttcaatcatatgattcctccttcagttgcagatcagatgagagcgatcgattttcagcatgctgtgatgttattccattatatataacgcttgtggaaacaatcaaagcaggatgatcatcaccccctgatctgtttaaagaatcatttcccccgggaggcggtccctaatccctatatcgtaaatggcggaatatatcgtccatccacatcggtaaactgatattctttggctaaatcaccaactcttaacgcacgtccgcttttctccatcacatccggatccttagccaatgctgtgattccgcgtccgacataataaggcgtttcggttctccttaaatcttccgactcccgccaatgcgcctcatctgattcatggtatttcagcacaagttcggttctcataaatcccggcgaaacggcaataacggcaatgttgtcccgttttaattccaatgaaagaccgtacgccatgcggacgattgcgttcttggccaaatcgtaataaaactgtccggtgtacttgttctcatcccagaaggtcgtgtgaatgataagagcttgtttattttcgcgaaggagcggcacggcgaagtggtttgtcgccagctgggcacgcaccccggcggcgaacatcgtatcccaatttttcaatgacaattcccaaaaaggctttgcctcgacacccagatcgtgcgccccccacacattgttgatcaaaatatccagttttccttgctcttcgcgaattttagcgatgacagcctctgtttctgcatcgttcgtatgatcacatcttacagcaatagcctttccgccggaagcttcaatttgtgacacggtgtcatcaattgtaccgggccattgattcgtggaagcccctctgatgctgcggcctgtaatatacacggttgcaccggcttttccaagttctgcagcgatggcgcggcccgcgcctctgcttccgcctgttacgagggcgatttttcctttcagcggcttcattcatcccattcctttcatttaaaaagatatgttcattataaaagctcaatcttgacaaccattgtcatattttattaaataagttcattcattgataagaaaggtggtcatatgagaggggatcgactgatatctattcttttaatgcttcaggcacaagggcaaatgacggcgaaagaattagcggaaaggctggaagtctccgagcgcacgatttacagggatatggaagctttaagcggagcggggattcccgttgtggccgaacgcggcataaacggaggctggtcattgcttgatgattaccaaaccactctaaccggcttaaaagaatctgaaatacgcgcactatttgttccgctttctgaacaattgcttgacgatctcggattaacccgcatatccgaagaagcccgaaataaactgattgcctcgctgccttcggaatatcgccaaaacgcaaaggatgtatggaaccgcatatatattgatacctgttcatggcgccataagaaagaaaaagcagaatcctttgaagtgctgaaagatgccatatggaaagatcaaaaattaaaaattgtctatcagcgggcagatggacaaacggctgatcgtgttgttgcaccgcttgggctggtggctaaaggggcgaactggtatctgattgcatctaaagaaaatggggagattcggaattacagggcttcacggattaaatctgccgtttttgtccgcgaaacgtttgataggcccgaaaattttgatattgctcacgtgtggcggtcttcaacaaaggaatttattgaaaggctgccgacgtatgaagtgcgggtgaaggcggcgcaggccatcttgccgaggctgtcgtttaccaatcattttgtgcggatcatcgaaacaaatgagatcgatcaggagggctggatccccgttacgctatcctttgatacggaagaagaagcaaaaaggtatatactcggattcgcagagcacatgaggatcattgaacctaaagaactgcacggaaagatacttaaaatggctgaatccatagttgcgcattataaaacctgaaagcggcaatgactttatgttaaagacatacatgataaaccctgccggccgcaaacggcaggcagggtcttcgtttaatgaacattgaaatatctggcttccgggtgggagacaacgatcgctgatacggaagcttcgggctccatcatgaagccgtctgttaagtgaacgccgatgccttcgggctggatgagcctgaaaagcttttcctgatcttcaagattcggacaggccgggtatccgaaggaatagcgctgcccttggtatttcgcctgaaaacgctgttccatcgtgaagtcgggtgcatcagggaagccccagcggtcgcggataacctggtgcgtccgttcggcgagcccttcggccagctcaagagcaagcgcttgtaccgcatggcttttcaagtagtcgccttcctccttaaagcggttggcggcagctcttacatgcctgcccgccgttacggcaaagaacgagacataatcaagctctcccttcggtcggacgtaatcggaaatacagcggtacggaagcttttcctgccttggaaaaacaaacgtttcaaggatgctgtctttgttcactggatctaaaatatgaagcgaatccccgtcgctgtacgcagggaaaaattggtagacgaccgcaggatcgaaccagccgtgttcttttccgtctctcagcagctcgtcgatcagttctttcagctccagtgcttttggatgctgttcagccagtagttttttgactttccctttcaagccgagatgatggccgagcagcatttgttcattgacatacggcacaatataggaaaggtcgatgtttttcaaatagtgccgtttcaagtcttcaggctgaaagaccggcgccttcggaacgtgcgcccgtttttcaagcatttcaattacggctttcgtctgctttttttccgcgacggcggcgggtgcagcggcttcttttttctcgagaaactgcgacgggtccgtccgcagctgattggcgagcgataggccgtccatggcgtccttcgcgtataaaaccggccctttatattcaggcgaaattttcatgttcgtgaattttcttgaaagcgcggctccgccgaccatgatcgggatggaaatatccgctttatcgagatccttcgccgtaacgaccatctgctgcgccgatttgacgagcaggccggacagaccgatgatgtcggggttctctttgcggatcgcctcaattaactcctgcggtgtcactttaatcccaagatcgactaccttgtagccgttgttgcttaaaatgatgtcgactaagtttttgccgatatcatggacatcgcctttaacggttgccaaaatgatctttcctttgccgctgtcgtctttcttttccatatattgttcgagaaaggaaacggcagctttcataacctctgccgactgcagaacttcagcgacgatcagctcattgttgttaaacagccgtccgacctctgccatgccgtccatgagcggaccgttgaccacgtcgagcggggtggcgaattttttcaacgcttgttcgagatcgggaatcaagccttcttttgtaccttcgattacgtattcggccaggcgctcttcgagggaaagggacgttttcggctgtttgtccgcttttttctttccacgatagaagtcagtgaaggatgcgagcgttttatcgtcggtatgaaacagaagtttttcagccatctcgacttcttctttaggaatggaagcaaaccgctcaagcttttctgtattgacgatcgcgtaatcgagcccagcctgtgttgcgtggtacaagaatacagcatttaagatttcccggccgacgggcggaagaccgaatgagacgttgctgacgccgagaatcgttaagcattcagggagctgctctttgatgaggcggatcccttcgatcgtttctttagctgagccgatgtattgttcatcgcccgttccgaccgggaagacgagcggatcgaatatgatatcgctggccggtattccgtatttttcggtgagcagctgatgcgaccggacggcgacggccagcttttttgccgcggtgactgccatcccctcttcatcgatcgtgccgacgacgagtgcgcctccgaactgtttgacgagcggaaggatgtcagcgaaccgttcttcgccgtcttcaagattgatcgaattgatgatcgcttttccctgcgagtatttcagcgccttttcaattaccgttttgtccgtcgagtcgatgacaaacggggcttttacttttttcatcgctttttttaaaaagccttccatatcttccgcttcatcgcggtccgggtctgcgagacagatgtcgatgacatgggcgccgtttttcacttgggctctcgcgatttcggatgcttcctcaaatttatgctcggcgatgagccgcttgaattttctcgagccgatgacattggtccgctcaccgacaaaaaggggacgcattgtttcttcgtaaattaatccgtcgattcctgagacggtgtgcggctttgctcccgaaggaaccgtccgcggaggcagaagggctacttcatcggccagcgcttcaatatgggcgggcgtcgttccgcagcagccgccgacaatgttcagccagccttcttcagcaaacgccttgatttttttcgccagcgattgcggtgattcatggtattgcccctcctcatcggggaggccggcattcggatagcagctgacggccgtcctcgctagggaagaaagggtcctgatgtgatctgtcataaattccgggcctgtcgcgcaatttaaaccgacgctgaccggtttcatatgctcgagggagatatagaacgattcgatatcctggccggcaagcgtcgtgcccatcggttcgattgtgcctgacaccatgagcggaagggttttgccggttttttcgaaggcttgtctaatgccgataaagccggctttaacgttcagcatatcctggctcgtttcgaggagcaagaggtcggctccccccgtgatcagcgctcttgcctgttcctcgtagttatcgatcagttcgtcaaaggtggtgccgccggtgacggaaagggtttttgtcgtcggacccatcgcaccggcgacaaatctaggccattcaggagttgaaaacttttcggcggccgctttggcgagtttgactgaagcgaggttgacttcataggctcgatgcccgaggtcgtactcgtccagaacgagccgggtggctccgaacgtattggtctcgatgatatcggctttagcctcgagataggcttcgtggatgccctgaatgacatggggcgccgtaatgcttagaaattcattgcacccttcatatgcctcgcctccgaagtctgcggcggacaaaccggcgtcttggatcatcgttcccatcgcaccgtcaaggacgaggatttttttcttcagctggtcattgatgttagacatttgtcttctccttttctttctgatggatatatgccgtcagctcggcggttagatcggaccgcaaaaacggtgtgatcagataaatgccgttgaacaggtcgcacgccgcatcaagcagagagcgagcgatcgcgagcccttcctcggcctgtttttgtttgtcgtttcctgccagcgccatcttttcgcggattgaatcagacagcttgatgccggggatttcgttgtggatgaattccgcgttgcggctgctggtgagcggcatgacgccgatatagatcggtgtttcaagatgccgcgtttccttgtggattttaatgagctgctcctcggaatagacaggctgggaaatgaaatagtctgcgccgcaggcgatttttttctcaagccgtttcaccgctttgtcaatgtgtctgacattcggattgaaggcggccgccactgagaaattcgttttcttgccgagcggtttacccgaataggacaagccttcgttaaactgcttgatcaggctgatcaaatcgaacgatgtcaggtcatagacggaagtcgctcccggaaagtcgccgattttcgacggatcgccggtaatcgccagcacgtctgacagccccagcgtatcgagtcccattaaatgggactgcaggccgatcaggttgcggtctctgcatgtgatatgaatcagcgacctcatatcgaggcgctgttttaagagcgccccgcaggcgacattgctgatcctcggtgtggcaagggagttgtccgccaatgtcagtgcatcgattccggctgattttagctcctctgcggcgtgcaaaaatttctcaaagtttaattgttttggaggatcgagctcgacgataatggaccgtttctgctttgccagatcgtcaagagcaggctctgtcctttcgttttgaacggcaagcgccgctttctttctgattttcactcgtttttcggtgactggaggaagtcctttgacggcctcagccatcgctctgatgtggttcggcgtcgttccgcagcagccgccgatgatccgtgcgccttgattgcggaattcctccgcgctttccctgaaatattcatcatccgtctcataaacaagcctgccttcgacaagggacgggaggctgctgttcggatagacggaaagataggcatcttctaaaagcgggacttcttcaagcgctctgatcatatgataagggccgagacggcagttgatgccgacgacatctgcgccgagtgatgccagctgcttcagaccgtccgcaagcggggtgccgtcctgaagaacgccctcttcgtgcatcgagacattcaaaatgatcggcagctccgtttcctttctggcaatctttaaaacttcgcgcgcttcttctaagtcgtaataggtttcgagcagaagtccgtccggctgctcatttaacagaaggtagagctgttcgcggaagcttcttttaatgtcctcgagagaatacgagtttttgttgaacgtccggattccgccgagcgtaccgagaacataagcggagccggcggcggcgcgggcgaggcggacggctttttcgttgatttgttttgtttcgtcttcgagtccgtatctggacagcttgatgaagtttgcgccgtacgtgttcgtttgaataatgtcggcgccggcctgtacatacgcttcgtggacgcgtcttatttcttcgggcttggagatgttcagttcctcaaaacacctgtcgatcccataggaatacagaagcgtgcccattgcgccgtcagcgattaacgttttgttttttatatcctccaaaaaacccatcgttttcccccttaatcattcttaataaaacaaaaaagtcttctgggaagcagaagacttttcagcgacatttgtccgtcttcttatcttccaagcaggctgcttgctggatttagcaccttggtcatgaatattcattcaccggttgctgaggcttcatcgggccagtccctctgcctctcttgataagaacagctatttagtttctattgattacttttactcaatttaccgaaaatcgggggaataatcaacagtaaattaagaatttatcgaaaatttataaattgaacatcaatcggcaggtcggcttccctcaccatcgcgatgatttgctgaaggtcgtctttattttttccggttacgcggacttgatcgtcctgcacttgcgatttaactttcagacccgatttttttataaggttattgattttttttgcgttttctttgtcgatgccttgaactaattttccgcgctgtctgaccgtgccgcctgaagcgttctcaagctttgagtattcgatgtttttcgtcgggacgttccgcttgatcagtttgccgacaagtacgtctttcaactggttcattttaaattcgtcgtctgatacgagaacgagttcgtctccttcgagtgtgatgctgctttttgaccctttgaaatcatagcgtgtgccgatttccttgagagcggtctggattgcgttttgaacttcaggcagttcaacctttgagacgatatcaaatgagctttctttcgccatgtgaaaaaacctccatccattttacttatgagtcaattatagtagaataaggtgaaacttccaatatcgagcggttttgcctggccgcgatctggcaataatttgaacattggaggaataataagaaaaagaaaaacaggcggataagaaaggaagaagcagtatgaaacctggacagcagctaacattgaaaatagatcataaagcagattacggttactttttgacggacggcgaaacggcggtccttctgcatcagagcgagatcaccgaggatattgacgggagagaagaggtcgatgtttttttatatgtcgatcacgaagatcgccttgcggctacgatgagaaagccgatcatcagcgctgaacaatacggctgggtggaagtcgttgatgccgtcagcggcatgggcgttttcgtcgatgtcgggctctcgaaggacgccctcgttgcgacagagcatctcccgccgtatgaatcagtatggccgcaaaaaggagacaggctgtactgtatgctgaaaatcacggggcacggaaggatgtttgccaagccggcgccggaggacaagatcagcgaactgtttactgaagcttcacccggcctgatgaataaagagctcaccgggacgatctaccgcttgatcgcatcaggctcttttatgatttccgaagccggcatcagaggcttcatccattcttctgagcgaaaggaagagccgaggctcggcgaaaagctgactgcaagggtgatcaaagtaaaagaagacggttctgtaaatctgtcgcttctgccgagaaagcaggatgccttgtcggttgatgcggaacaaattctgacttatatgagatcgagaaacggcgcgatgccattctgggataaaagcgatccagaggatatcagagagcgcttcaacatgagcaaagcagcatttaaaagggcgctcggccatctgatgaaacaggataaaatctatcaggaagagggttggacgtacgagaaaaaataatcttgaggcggcgttccgatcgggacgccgccggtttcttacaggtgatgaggcttctttgattcctggtgtttaccggcttgtctgttcttttcggcgagccggtttttctgctggttgacggcgttattgtcaaccggctttttatcatcatctttcatgaggaagcacctcccgtcaaaatgtcgctcttagcttgctcactgccggcgaaactatgtactctcccaattgcgatgttttttgccgggaagtttatgccaccttgttccgtcagcatacacatatcataagacccaaaaaaggagacttggtatgaaacattgctgctcagtttacattcatcgcgtttcggcaggaggggtcgtcaacttcggcggtgcgtacaaaatttgtccgatcacaatggaaaaagtggtcgagggatctggaggcccggatgtcgcgacagctgctgccggctttcttgatggagcgcttgcgccggccgttgaggaagggacagtcaccgaagacagctgacgctgaggcctgcttttaaaaagcaggcctcagcgtgtcgacaaaccctcgcattcgttgtcaggcctgctaagtcggtgctcacgaataggagaaggatcggcggctaatcgcccaggcgtcctgcctgaacgccgccgtcgtcacttcctgtgaaagtccgctccgatgctcggccttcctagactgaaagggttttgggtcacgctgaaagaaggatgacaaaatcccaaaactaagagccgttttgggattttgtcaacaatctaaggcctgcttttataaagcaggcctctgttttatcttatcttttgtctttccccggaaaaaagaccgccaatgttccgggtccggcgtgggcgccgaccgctgaaccgatcatgttgacgacgatctcctccggctggaattcggcttcgatcatccgtttgacttcttcggccgtctcttcgtcatctccgtggctgatgccgaccgtctgtccgctcaaatcgacgcttctttccttcattaattcgatcatccgtctgagcagcttctttttgccccggattttttcaagggggacaagcttgccgtcatcaacatgcaaaagcggtttaatattcaacagcccgccgacaaatgccgatgctttgctgattcttccgcctcttgccaaataagtcaagtcatcaacggtaaaaatatgttcaagatgttcgcaaaagtcctttacagacgactcgatttcttgtattgtattgccgttagttgcgagtttgagggcgtgcttgacagcaagcccatagcctaatgaagcgcattttgagtcgatgatccgcaggtcgaaatcagggaactcctccttgacttcgtttgccgccatcacagccgtctggtatgttccggacagctctgaggaaaaggcgatatagagagcgggtttattttcgttggccagctcgctgaatgcgttcttgaacagcatcagagacggctgggacgttttcggcgctttgccttcgcgcatcgcttcataaacgtccagaggctgaatcgtcagaagatcatcgtattctttttcatcaagcagcacccttaacggaataaatgagatgcgatgttcatcataaaaagatttcggcaaatctgccgcgctgtctgctaaaaggtgaacgttcatttgaaccccttctttctaaaaaatggttgaaaaggacactaagctgtccttcggcatacttcgttttttaggtcaactatatcatatatttttacattgacgttttcaaaatattgttttaagggtaaaccaaatatatacgaaagtagcggaggaactaaatatggtcatagcggaagcaaaaaaattgttcattgtcatcatcggcgccttgttaaatgccatcggattgaatctgtttctgattcccgccgatgtttacgccagcggctttacgggggtggcgcagcttttatcgagcgcgcttgaccagtacagcccgatttatttttcaacggggacgctattgtttattttaaacattcccgtcgggattctagggtggctcaaggtcgggcgctcatttacggtctacagcattttgagcgtggccttgacgacggtctttttggggatgctccctgaggcgagcctgtcaaacgacattttgctgaatgccgtgttcggcggggtgatcgccgcggtcgggatcggcctgacccttaaatacggggcttcaacgggcggtttggatattattgcgatgatcctggcaaagtggaaagacaaaccggtcggcacctatttctttattttaaacggtgcgattattttaacagcaggattattgaacggatgggagaaagcattatatacgctcgttacactatatgtgacaaccagggtgattgatgccatccacacccgccacgccaagctcaccgttatgattgtcacaaagaaagcggaggagatcaaagaagccatttacgggaggatggtccgcggaattacaaccgttccggcgaaaggcgcctttacgaatgaacagaaagaaatgatgatcattgtcatcacaaggtatgaattgtacgacttggaaaaaatcattaatgaagttgatccaaaagctttcacaaacgtcgtacagacaacacaggttttagggtttttccgcaaagattaatgaaagggtgaatgaatgcggctgatttccatgattgtgatgctgctgtttgtcagtggatgcgggcaaaacggggatcaagtccccgataaggaggtatcaggggaagtggataacgggagtgtgacattgacggttgaacccgtccagaagcagggagaaatcgaatttcggatgtcggttgtaaaccatacggatgatgcggcagagtttgaattcagcagcggacagaaatttgagctgatcgtcagcgacaaagaagggaatgaaagataccgctactcgaaaggaaaaatgtttacacaggctttccagacgatgacgctcaatccgaaagagtcctacgattttactgatgtatggaaagaggtgcctgaacccggcacatacgaagtaaacgtgacatttttggggagatcggaacagtttgcaactttgagggccggcaaaacgtttgaagtgaaataaccatcaaaaaaggcatcccgggaaaggatgcctcttttgtattctgtcaggaaggatcggcggctgaatgaacaccgccacggtcacaggatgtgaccgttaatattgatccccattgaaaatagaatttttaacgatgacatagtctacgttgcggatcgcatcgagcttgtttcctcccgcataagaaatggacgactgcagatcctgttccatttctgtcagcgtatccatgatcgcgcctttatgctccacgtacatttttttgccttcgacatttttcttttcgcctttttggtactcagaagctgaaccaaaatattctttgtagagcttgccgtctttttcgatcgttgctccaggcgattcttcgtgtccggcaaacagcgaaccgatcatgaccattgtcgccccgaatctgaccgatttggcgatgtctccgtgggtgcggatgccgccgtcagcaatgatcggcttgcttgccgcttttgcgcaccagcgcagcgcagccagctgccatccgcccgttccaaaaccggttttgatttttgtaatgcagacttttccgggaccgatgccgacttttgtagcgtcggctccggcgttttcaagctctctaacagcttcaggcgttccgacatttcctgcgatcacaaagctgtccggaagatgttttttaatgtgctgaatcatattgatgacggcgtttgagtgaccgtgggcgatatcgatcgtgatgtactcgggtgtgagattctctctcgtcagctcttcgataaacgcgtattcttcatctttgactccgacgctgattgaagaaaacaaaccgcgtgccttcatgtctttaataaaatcgatccgtgtttccggctcaaagcggtgcatcacataaaagtaaccgttttccgctaatgaaacagccagcttttcatctataatggtctgcatattggccggcacgacaggcagtttaaatgtccttccgccaaactgcacggatgtatcacattcagaacggctcttgacgatgcactttgcaggaattagttgaatatcttcgtaatcaaatacattttccaatataaaaacccccaaaaaaacgaatatttattaataagttatttaaaatgttcgccttttataatgtacttccttttgttcccgatgtcaaatttttatgctttgagagcggaaaaataaaaaaggagccgtgccgatggcacagactcctctccggctgtcaaaagccggtgcggtattatgatagttgatctagctgctcctgaagattgtgaagctgtcgccgttcggcatcagttgaattggcatacgccgaggaaagggcgtttttagctcttgcaacggctttcgccttttcgcctgaatccgccgaagcttcagctgcatgtacggctgctttggccatttgaaacagttcgtttctcatttacagccctccgcattccgtcgggccgctcttctgttcagcctcttctaatgtggagcggtaagggaacctggcggcatgctgtttaagcgagtctttgccttgctgaataaaccgttttgatttgctgcgtttacccatcttgaattcccccttaacacaagtgacggtccggtgcggccgtcttctcatagtatggccgttttgaaaagccgtttatgaatggcaaattataaaattataaagcgaagtaatcctttaaaaagactgcgattccgtcttcctcattcgatttcgtgaccttgtttgcaacgctttttaccccttcgatgccgttgcccatcgctactccgcagcctgcgaactcaagcatttcaaggtcgttgtcttcatcgccgaaggcaatgacccgctcaggcgggattccgtagtagtccgtgattttctctaagccgaccgctttattgatgccgcttttaatcagttcgattacatgccacggggccgcccatcttctatggtcgaccatctctgcgtgtacgtctgacagataggagcggatcgccggaacatcctcttcttttgcgtgaatcaatacgcttgtcacatcctggccgaggtttgttcttaaatctccgactgtaatattcgggctgcccatcgtaaagacatcaatcagcttttcgtcatgataatgaaaataaacatcatcgacaatttcagcaaggatattatgtacgttgtacgtttcgctgacttcaatgatctgtttgaccacctcgagatcaagagatgtatggaagcgtccccagctttcatctttagggtgatggacaaacgcgccgttgaaattgacgatcggcgtatcgagctggagctgatcataatacatggagcttgctctgaacggtcttcccgtagaaatgcacacgtaatgtccatcttcccgcagcttgcggatgacttcgctggagctttccgagatggtcttgtcgtcttttaataatgtaccgtctaagtccaatgcaattaaatatggttttgtctccataaatgctcctttaatgtgaatttgaaagttctgacttacctatagtgtatctttttaccttctttattgtctacatgttaaacttatgatgatggacatcctaaaaggaggaagaaacagtcgtgatcataatcgaaaagcagcatatttcaaacattcctcttttgcatattgtaaaagaggagaaaaaagagaaagctcttcctcttgttttcttcatacatggttttacaagcgcaaaagagcataaccttcacttcgcatacctgcttgccgaaaaaggaatgcgcgtgattctgcccgaggctctctatcacggggaaaggaatgaacagctcacccaggaagagctcgccccgagattttgggagatcgtcacgaatgaaatcaaagagctggaagtgctgaaaaaccactttgaacgggaaaacatgattgaaaagggccgcatcggcgccgccggaacatcgatgggcggcattgtcacgctcggcgctttgactcaatacgaatggattacaactgccgtcagtttaatgggcagtcccgcctatgtagaattttttgatcagcagctcgcatttatgcgtgaaaagaaaattgaacttcctatcacagaagaacaaatcgatcagcagcgcgaagaactgaagcgttttgacttgagtctgcagccggacaaattgaacatgaggccgcttttattttggcacggcaaacaggacggcaccgttccatttgctttaacgcgccgcttctatgaatcgattattccactgtatgaagctcggcctgatttgctgcattttatcgaagatgagcgggccggacataaagtatcgagggaaggccttttgaaaacagtcgaatggtttgacgcgcacttgtaagcactatcgttttagaaaatgaacgaagtgcgttatactgatgaaaaaaggagtgaggaagagtggatgaagcattaaaagaaaacatcatgggcgcccttgaacaggtcgttgaccctgaattgggcgtcgatatcgtcaatctcggccttgtatacgacgtagatatggatgagaacggcaaaacagacgtgaccatgactttgacttcaatgggctgtccgctggcgccgatcatcgtagatgaagtcaaaaaagcgctcgcagatattccggaagtcaaggaagttgacgttcatatcgtctggaatccgccttggacaagggacaaaatgtcgcgatatgcgaaaatcgcacttggtatacaataaacgtttccagagcctgttcaaccgttgacaggctctttctcttccatataaagggaatgatcccggcagatggcctctcccgttattaatgaaaaagaacgcttttacaagcgttctttttttattgcaataactgctgccggcacattctccggtttgaaaagcggggaacccgggaaggtaagaacggagcacgaccgagccgaagaaaaggaccgccggcgggaggaaagaaccaatatgaaaggtgattgaaaaaatattaaatatacaattgaattaatttttattcatgttataatgttaaataatttcacaaagaccaagaaggtgaactcgttttgaaaataggtattataggtgctactggctatggaggggcagaaatcatgaggattatgaggactcacccttatgcagatgaatgcatattgtattcatcgagtgatgagggagcccgctatgacgccgcatacccgcaccttgtgaaactgacagatcaacacctgcaaccgatcgaggttaagaggattgcgaatgaaatcgattttttatttatggcagcgcctccggggatatccagccggctgacgccacagtttgatgcatatgacatacccatcattgatctgtccggcgatctcaggatacagaacccaagcgtctatgaaaagtggtataaaagggaagccgcgcctgaacacgtgcttcaaaaagcggtatacggactgtctgagctgaatcgggaagacattaaaacggcgcagtatatagccaatccaggatgttttccgacagcggttcttctcggcttggcgccgctcgtcaaaagcggcagcatcaacgaatcttttgtcatcatcgatgcaaaaacaggggtatcgggggcaggcagaaagccgtcgatgggcactcatttttcagaggtcaatgacaattttaaaatatacaaggtaaacgaacaccagcacacgcctgaaatcgagcagactgtcaaacagtggaactccgcatttaaaccgatcacattcagcacgcatttagttccaatgacaagaggcattatggcgaccatctacacagagctgaaagacagcatggatgccgaacagctgcagcttattttttctaaattttataaagattcatactttgtcagagtgagagaaacgggttcgttccctgccacaaaagaggtgtacggcagcaatttttgcgatatcggcgttaccgtcgatgaacggacgaacagagtgacaatcgtgtcagtgatcgataacttgatgaagggagccgcgggtcaagcggttcaaaacttcaacattatgaacggcttgagcgaaaccgccgggcttgaatttacgccaatttatccataagacgggagagaacaaacttatgattcaggtgagtcaagacagcataaaaaaaacagacggaagcgtcgcttcgcctaagggctatcttgcaaaaggggtccactgcggcctccgctattcaaaaaaggatcttgggatcatcatcagctcaagaccggcggtgagcgccgccgtttatacccaaagccactttcaggctgcgccgatcaaggtgacgcaggaaagcctcaaaaaaagcgcgcatctccaagccgtcatcgtcaacagcgccaatgccaacgcatgcacgggagagcagggcttaaaagatgcttatgaaatgcgccgtcaaagcgctgatatgctcgggatcgagccggatctggtggccgtgtcctcaaccggcgtcatcggcgaatacctcaatatggaaaacatcacaaaaggcatcagccttctcgccgagacagagcctgccgaaggcgatttcgaagaagcgatcttaacgacggacaccgtgatcaaacaaacgtgctatgaactgatgatcggcggccaaaaagtgacgatcggcggagcggccaaggggtcgggaatgatccacccgaatatggcgacgatgctcggctttgtcacaacagatgcatgcatcgaagaaagcgcgctgcaaagggctttaagggaaatcacggacgtttcgttcaaccagataacggtcgacggcgatacatcgacgaacgatatggtgctcgtcatggcgaacggatgcgccggaaatgagcgcctccatgaagaacacgaagattggccggttttcaaaaaaggcctgcagcttgtctgcacagacctcgccaaacaaatcgcaagagacggggaaggggcgacaaagctgatcgaggttgaagtgaacggcgcgaaaagcaatcttgaagcgcaaatcatcgccaaaaaaatcgtcggctcaaaccttgtaaaaaccgcggtttacggaacggatgcgaactggggcagaatcgttgtcgcaatcggggacagcatggctgctgtgacaccggagaaggtggaaatccgcctgggcggccaatgcctatttaaaaacaacgaaccccagccgttttcggaagagctggccaaaacatatttagaaaacagcgaagtgaaaatcgaggttttcatgcaggaaggtgaaggaaagggtacggcttggggctgcgatttaacttatgaatacgtcaaaatcaatgcgagctatcgtacgtaaaaaaggggatcacaatgggtaaaacaatcgtttttaaatgcggcggaagcgtcatccgcgaactctcggacgaattttttcaaaacctgaaagatctgactgaaagcggctggaaaatcgcgctcgtgcacgggggtggacccgatattacaaagatgctgaagaagctcaatattcgaaccgaattcgtcaacggacagcgcaagacgacaaaagcggttcttgaagtcgctgaaatggtcctgtccggttcgatcaacaaatttttcgttgctgagctgacaaagcacgggcttccggctgtcggcgtatcgggaaaagacgggggactgctccttgcagactatttaaatgaaaaggaatacggtcaagtcgggcgcattaaaaaagtaaacggccaaatggccgaagcgctcatggaaaaaggatttattccggttatcgcacccctctcgatgacggatggctgtgagaccttgaatgtgaacgccgatttggcggcgtcggctgttgcggcagccttgcgcgctgacaaattgatgtttgtgacagatgtcaaaggaattatgaaaaacgaagaaatgctgaaagagctgacgcccgaagacatcgaaagcctgattgctgaaggcgtgatctcgggaggcatgataccaaaagtgcattccgcaaaagaggctcttacagatgaagtggaagaagtaatgatcgtaagcgggaaaggatctttcctgacgaaagacgatttcatcggcacgaaaatcatcaaacaaaaggaggccgtatcgtgagtcacttatttcaaacgtacagccgctggaatatcaatattaaaaaagcgaaaggcacgatcgtccaggatgagaaggggaacgcctatctcgatttcgtccagggaatcgcggtctgcaatctcgggcattgccccgattcagtaacggctgctctcaaaaaacagcttgacgatgtctggcatgtttccaatttgtttcaaaatgagcttcaagaaaaggttgcacagctccttgccaaaaacagtgcaggcgatctcgtcttcttttgcaacagcggggcggaagcgaatgaaggggcggtgaagcttgcgcgaaaacatacgaaaaaaacaaaaatcgtaacctttcagcaatcgttccacgggcgcacgtatgcgggaatggctgcaaccggacaggaaaagatcaagcacggattcggaccgatgcttgaaggattccattacctcccttacaacgagccgaaagcatttgccgaattgcaggacgaaaaagatatcgcggcggtcatgctggagccgattcaaggcgaaggcggcgtcatcccggcgagcagagaatttctgcagagcgttcaagacttttgccgagataagcaggctctccttatcattgatgaagttcaaaccggaatcggccgcaccggtaaagcattcggatatgaacacgaagggctgtcacccgatatcgtcaccgttgcgaaagggctgggcagcggttttccggtcggagcggtcatcggcaaaaaagagctctcagaagcgttttcgccgggctcccacggcacgacattcggagggaacatgcttgcgatggctgcggcaaatgccacgttggagaccatttttgacagaagctttcttgaagaagtgagcgccaaaggagcatttttgcatcaacagctgaaagataagctccaatttccgcttgtgaaagatatccgcgggaaagggctgatcgccggaatcgagtgcaaagaacccgtgcagccgctgatcgaagcgcttcaaaaagaaggcctgctcgttcttcctgcgggtccgaacgtcatcaggcttctgccgccgttgacggttgcgaaaagcgaaatcaaagcggccgtggagaagctgaaagatgtcatggcaaatcattctgctgtaaagcagtaattttttttgaaatgaaagtataaaaattcatgaatatcactatttattcatcaaaggtgggcataagatggaaggatatttagttcttgaagatggtacatccttcagcggagaactggacggtcttgacggctgcaccggtgaagtcgtcttttttacgggcatgaccggttatcaggaggttttgacagatccttcatataaaggccagattattgtctttacgtatccgctgattggcaactatggaattaatggaagcgatgctgaaagcaaacagcctcaggtgagaggggtcgtcgtctatgaagcgtgcgacagattttcccaccatcaggcgacagaaagccttcgggaatacttggcgaagtgggatgttccgcttttgtcgcacgtggacacaagagcggttgttcagcatatcagggcaaaagggacgctgaatgcgaggctgacgaaacaaaaggacgacatcccggctccgcgccagctggaaaactatgcggcacaggtttccggacaaaacgaaaacggcgcttttggggaaggcaatacgcatattgcgctgatcgatttcggctataaaaagtcgatcgcttcatcgctagcaaaccggggctgcaaagtgacggtcgttccctatcaagagatggacggcattgcgaagctgaatccggacggaatcgtcctttcaaacgggccgggcgatccgaaagcgatccttccatatatggatgcactccggggtatcatttcttcctatccgacgctcggcatctgcctcgggcaccagctgatcgcgctcgcattcggaagcgacacgtataagcttccgttcggccacaggggagccaatcatccggtcatggacaaagagaccggacgcgtgttcatgacaagccaaaatcacagctatgtcgtcgatcgggacaccatcagcgaaaatgaattttccgtcaggtttcatcatgtcaacgacggttcagtagaagggctgatgcataaaacactgcctgtcctatccgttcagtttcatccggaagcccatccgggaccggctgaaagcgaatggatattcggagaatatttgcagaaattgaacgaagcaaggagagagatcgcccatgcctaaagaccaaaccatcaaaagcattctcgttatcggatcggggccgattatcatcgggcaggccgctgaattcgactactcaggaacccaaggctgcatggcgctgaaaagcgaaggctaccgggtgattctcgtcaacagcaacccggcgacaatcatgaccgatgaatcttttgcagatgaaatctattttgagccgttgacagtggaaagcctcacacaaatcatcaagcgcgaaaaaccggatggactgctcgccaatctgggcggacagacagcgctgaatttggctgtcgagcttgaaaaggccggcattctgaaagcgtacggggtgaagctgcttggaacatctgtcgatacgatcgaaaagggtgaagacagagaaaagttccgcgccttgatgaaagagctgaatgaacctgtgccggattcagaaatcgttgacaatcaggatgatgcgcttcgttttgcgctctcaatcggttttccgattatcgtgcggccggcctatacactgggcggaaaaggaggcggcatcgcggcgacaaaagaggagtttctgcctttaatcgaaagcgccctcctcgcaagtccgatccatcaatgccttgtcgaaaaaagcattgccggttttaaagaaatcgaatacgaagtcatgcgggacagtaacaatacatgcatcaccgtctgcaatatggaaaacatcgatcctgtcggcgtccatacgggagattcgatcgttgtcgccccgtcgcagacattaacggatgcggattatcaaatgctgcgttctgccagcttaaaaatcatttccgcgctcgatgtcgtcggcggctgcaacattcaattcgccttggacccggagagcaaaaactattatgtcatcgaggtcaatccgagagtaagccgttcatcagccctcgcctcaaaagcaaccggctatccgatcgcaaaaatggcggcaaaactggctgtcggctacacgcttgccgagctgaaaaatccgctcacagattcgacctatgcaagcttcgagcctgcgcttgactatgtcgtcgtcaaatttccgcgctggccgttcgacaaattcaaacaagccgaccgcaagctcggcacgaaaatgaaagcgacaggggaagtcatggcgattgaccgcaatcttgaagcggccctgcaaaaagcggtcgcctcccttgagctgaaaacatcaggaacacatttgcccgaacttggcggcgtatcttctgaagtgctgtggaagctgcttgagacccctgatgaccgccgtttctttgcggttatggaactgctgagcagggggacttccatcagcgaaatacacgagaaaacgaaaatcgatgattatttccttcatgtgttttctaacatcattcagctggaaaacacgctgatggagcagggagactcgttgtccgtcagccttttgaaaaaggtgaaagaaaagggatttaccgactttacgatcgcttccctcaccggaaagacagaagaagaagtgcgcgcgcttcgcaagaaaatgggcattgccgcatcctttaaaatcgtcgatacatgcgcggctgaatttgatgcgaagacaaactatttttactcaacgtacttcgggaaaagcgacggagacatctctcaaaaaacgaaaaagcgggccttgatcatcggttccggcccgattcggatcggccagggggtcgagtttgactacagcgccgtgcacggcgtcatgacgctgaaaagcctcggatttgaaacgatcatgctgaacaacaatccggaaaccgtcagcacggattatgaaatggcggaccgcctgtactttgaaccgattacacccgagcatattctcaatgtcgctgaagcggaagacatcgactttgcgattgtgcaattcggcggccaatccgccatcaatgtagcgcaagcgattgaaaaagcgggcatcaccctgcttgggacatcatcggaaacccttgacatacttgaagaccgcgatcaattttatcagctgcttgacgagctcggcatctcccatgccaaaggagaaacggcttcatcaaaagcggaagcggtgaaaaaagcgaacgaaatcggctatcctgtgttgatcaggccgtcatacgtgatcggcggaatgggcatgatgatcgttcactcagaagcggagctcagagagctgctgggcggggcatcgcaaatgccttacccgattctgatcgatcaatacgtatcaggaaaagagtttgaaatcgaccttgtcagcgatggcggcgatctctacatcccgacttatatcgagcatattgaaaaagcgggcgtgcattcaggtgacagctacgcgattttgccggggccttcggttactccggagatgaaaagcgccgctcgggatgctgccgcaaaaatcgtccgcaagctcggatttaaaggcattatgaacattcaatttatagcggattcggatgagctgctcatccttgaagtcaatccgagggcgagccggacggttccggttgtcagcaaggtgatgggagttccgatgatcccgcttgcggcgaaactgttagccggttcgtcactcaaagaactgaagcccgccgccaaaaattcacgcggcgttgccgtgaagtttccggtcttttcatcgcacgccattcaagatgtcgatttgaagcttgggccggaaatgaaatcgaccggtgaaggcatgtatgtcggcttcaatccggaaagcgccctgaagaaaatctttgcaggaatctggcaaacgaaaggctgcatttacatggaaggagccggcgagctccgttctctcgcagaacaggcgggcttcaccgtacagtcggacgattttccgggctggatcaaacggaaggacaaagcgctgcacatccatttagccgagtcaaaagaggcgagaaagcagaggatagaagccgtcactcacggcgtggcggtgatgacggaagaagagacggtgcgggcatttttgacgagcgggcatggaacgactaaagccgtgtcgcttaaagatttatataaaaaggaagtggagacatgtctactgtaaacatcggggcgacccgggagatcaatctgtcaggcaaggatttcttaagcctgaaagacttttcaaaagaggagatcgtctatttgctgaaagaggcagcggcaatgaagcgaaataaaattcaagacatctttaaaggaaaaacattggcgatgatctttgaaaaatcgtcgacgagaacgcgcgtatcgtttgaagccggaatggcgcagctcggcggaaacgccctgtttttaagcagtaaagacatgcagctgggcagaggggaaacgatcgcagataccgcgaaagtgctttcgcgatatgtggacgcgattatgatccgcacattcgaacacgaaaaagtcgaagagcttgccaagcacgccgagattcccgtgatcaacggattgaccgatctttttcatccgtgtcaagcgcttagtgacctattaacgattcaagagatgaaaggaacattaaaagggctgaaagccgtttatgttggcgacggaaacaatgtcgcgcattcgctgttaatcggctgcgcgaaagtgggatgcgacattacggtggcttcacccaaagggtatgagccgaatcaggacgtggtgaaactggccgagacattcgccgaagaatccggtgcggccgtcacgatcacaaatgatcccgtgtcagccgttcaacaagcggatgtcatctattctgatgtttttacaagcatgggacaggaggaggaagccgaagaacggatgaagatttttgctccttaccaagtcaacggaacgcttgtctcccatgccaagcctgattacatctttctgcactgccttcctgcccaccgggaggaagaggtcaccgcagagatcattgacggtccgaattcagcggtatttcagcaggctgaaaaccgcctgcacgtccaaaaagctttattaaaagcactgttatcttaaatgaaaaacagctgatccattgatcagctgtttttaggcgaatatcaaaacggcgatgccgatgacaaagcagtaaatcgagaaataaaccaagtttcctttcgccataatattcatgaaccagcgcaatgagaagtatgtagctataacagatgcgatgaacgcgaataaataaggaagaaaaagctctcctaaacgcggatcatgaaaaatatcggtaatgcttaaaatggttccgccaaggctgaccggtatgtaaagcaaaaatgaaaacctgagcgcggtttcagatttgaggccgagcgccatcgcaggaacgatcgtcgctcccgaacggctgatgccgggaacaagtgcaaccatttgcgaaaagccgatgatcacggcgtctctcagcctgatttcgccgtcgcttttccggccgcgcaaatttcgaataagaaacaatgccagacccgtaataagcaaagtaaccgcggtgatccggacgccgtctttaaagaaagccgaaatctcatcatcaaataaaacgccgatgacaccggcaggaatcgtggcgatgatcagatagatgataaacctgaagtccgcttttcctttttcattttttgttgtgacataagacagcccgtttaccgccagcctgaaaatatcgtttttataaacgagcagtacggcaattaaagaaccggcattcatcaaaagctcaaaactgaagccttcaatattcaagcccaaaaagtgctgtgccagcaccaaatggccgcttgacgaaacagggatcggctctgtgaatccctgaagcaaccctaaaaggatatacttgatcaacactaaaaaatccatgatactcctccgtttcccacaagttgtgatgcccttttaacagacggaatgtacaggcggttcgtttcaattttcagaacgcttttctcattaaactacacaaagcaaacagatgtaaagataaaatcgacatgttttttgagaaattggggcaatctaatggtaaaagggagtgaagcaaatgggacagcagcgtcaattccggccgggccaaaaagcgcccaataatggagtgtatgtggaaatcggcgaaacgggaagcatggttcagaaccctcagcaaatcaaattgagcgccggcgagttcttccctgaaacctccaatcataaccggctctggacatataaaagaaagccttaaaaaaacagccgtcggttttctgccggctgtctgtctaaagcaaaaaaccccacttttagaagccggggttttaatgttgacttgcatcctgtttaacaggcataatttctccaagaacaataacggctgcggtgatgataaagcccataatgacactggtttgaaggtcatacccagcaccgttcatggcgccgacaatgtagcaggccatctgcgtcaaaagaaatgtccagaaaaaagcgaccacaaatcgcacgtttcccacctcgtccttctcattcaattctaaaacttatcataccatatacatagccggctggaaaagacattttagtgaacaagacagggctttcaactctgctttcagaaatatcagaaagggtatttcattaaagtttacttttcatcatgaagactgggacttttccttattcgtttgctgcacgtacgacataaaataatgagcagattacggcaggaaggaggcgggcaagtgatgaaaataaccgaacgtttttttcaaatggattcagaatggaacgtggttcatcttccgtacaagccgaacggttttctggtgttcattttcggcgaccggaaccattttgtcggggaagattcgagcttctggcttcagcattacggacgaaatcagcttctaacgagcctgagaaacaaaggctataccctggtaaacagcaatttattcggcaggcactggggctccgaaaaagcggttgcatacgcgaaacagctgattcattacgtgttcaaacaagagatattaaatgaaaaaattcatctattggcggaaggcacaggggccctcattgcagatgagctccttcgctcaatcccgaaccaaatacgttctacagcgatggttaatccttgcctcgatcttcaggctcatcataaacgagaaaaagaaaacaagtttttctacaaacagtttattaaagaaattgccgaaagctacggaattacggagcgggaggcagccgattatccgttcaaaagcatatccccttatcacaatctcgtacccgttcatatttggcaaagactgaacgggtcaccgtatccgtatatgatccatgccaaaacgtttgaggagcgccagcttaaaggccgtcacagcgtggggcttaccctgcacctgtccgaacatcctcagcgcattcattcagcaatcgcgaactttttcaaaacgcatgaaaaagtcttatagagaatagaataatagcagcccgaaaatgatgaaaagggctgttttttgcttggttaaaaaagctgaaacgaaaggtggtccatcgaatgaagccggcacttgtatatggagcagatgagttcttcggcctttcattttgtgaacatctacttgaagagggtgttgacatagatgtaaagctggaacagacaagcgacgaaaaaaagctgatgtacctcgaagagcggctgatgtggctgggaagaaacgagcatttccgtctcatcgaaaaagagcttgaagccccgtacgaacaagtcttcatccaatacacaggctcagtgccggaagaagcgctggctgcaggcgttgaaaacaagcctgttattctgtttgtctaccaggaacaattggaagaggatttacgcgccggcatggaggaaaagggtgttgaactgatcgtgcttccggatctgttcggtccgtgggacgtcagggcagaggataaacaaaacagggacggagcgctttttgtgaacgacgcggccgcacaagccgctgcctgtgctgttgaaaaagatttttcagatttgcagtttgtacagaagacgccatacgataaagccgatgagatcattgaagaatggatcagacaaatgtctacatttttcgacaaaaaataagaaagatcttcctaatttacacttgaaaggatacaataaagatagatttgaattgctgtttttcgaaagggagttgaacatggcatggtgtacaggcttgtcgcgatttttttcattctcctggcgctaagcggctgcggacaatcgccgctgaaagggaaaattgaaaaagtcggtttgcttgtccctgatacgataaatgaccaagtatggggaaccaaaggatataaaggattattaagaatacaatccgtctacaatgtcgacgtctattataaagagggaatcgataatgacgctgccattaaaatggctgtagaagattttcacaaaaaaggcgtcaacctcatctacgggcacggaagcgaatatgaaaaagcctttaatgagatatgcaaagattatcctgatattcattttgttttaatgaactcgaaagccgaccaccaaaatgtgacaagcatatcgcttgaaggagaagcgatggggttcttcggcggaatgacggcggcccatcagtcaaaaacaaagaaaatcggcgtgctcgcaacgtataaatggcagcctgaagtagaaggattttccgaaggggctaaatacctcgatccggacattgaggtgatgacagaatatgtcggccagtgggacgacagcgaaaatgccgtcaaactgtatgaaaaaatgaagaaggcaggcgcggatgttgtgtatccggccggagacgggtataatgtccctgtcattgaacaaatcaaaaaggacgggctgtacgctatcggctatgtaagcgaccagtcggaattgggtgagaatgtcgttttgacaagcactatacagcatgtagatgacgcttatgaactcaccgccgacgagtttaataaaggaacgcttaaaggcggcaagcgctcatttgacattcaagacggcgtcatcgaaatgggagaattcagccctgttgtcgatcagtcatttcaagaaaagatgaatcggctgattgacgaatacaaaaaaacaaacaaactgccaaacgaacattgaggtgatcaagatgcacgaaaaatcaatggaatttttgcaaattgccatgaagtacgttccggaagcgaaagcagagatggagaaagcgggaatcgaactttccccggaaatgcttgagccattcatgaacttgtttacgaaagtgatggccgaggcttacgagctcggtaaagcggaagccggttcagacgcctgacttaaacgcccgcaaacgcttaaaaagccacttttcagaagaagtggcttttttatatggaaatcttatttttcaaagcgctgaccattgagccgatttctttaaacacaggcttcagctcatcgagcgaatccataatttctccaacctgattcaacacgtgcatataatcggcttcttgggatacttcagcgtcttcggcggtttccgcttccgcatccgtctccgtctcttcatgcctggcgggtgcatttgagccaaacatcatttttgtgaaaaaatcgtcgttcgccactcttcattccctcctttttcatatatatcactactatatgaaggttttggtctgctagattagacgaatatattgccaactaaaaaaaaatagggtaggattagtaccagatactaataattactcataacattagttggaaaaaatcatgaataaaggagtctttcctatgaaagctggaattattggaatcggccggtacatccctgaaaaggtgctgaccaatttcgacttggaaaaaatggttgaaacttctgacgagtggattcgtacaagaacaggcatagaagaaagaagaatcgcagccgaagatgagaaaacgtccgatatggctgtggccgccgcaagaagagcgatggaagatgcaaacatcgagccggaagatcttgatatgattctcgtcgccaccgttactcctgatcaggcattcccgacagtgtcctgcatgattcaagaaaagctcggtgcattcaatgcctgtgcaatggatatcagcgcagcgtgcgccggttttatgtacggcttagtcactggaaaacagtttatcgaagccggcacatataagcatgtgcttgtcatcggagttgaaaagctttcaggcattacggactgggatgaccgcaataccgccgttctgttcggagacggtgcgggcgccgcggttgtcggccctgtcagcgacgataaagggattctgtcctttgaactaggtgcagacggcagaggcggaaaacacttgtacttggatgaaaaagatcatacaatcatgaatggcagagaagtgttcaagtttgccgtccgccaaatgggtgaatccagtgtaaatgttattgaaaaagcgggattatccaaagaggatgtcgactttttggtgccgcaccaagccaacatccggatcatggaagcggcgcgcgaacgtttggagcttccggtcgaaaaaatgtcgaaaacggttcataaatacggaaacacatcagctgcttctattccgatttctcttgtggaagagcttgaagctggtaaaataaaagacggtgacgtcattgtgatggtcggcttcggcggaggtttgacatggggagccatcgccatgcgctggggccgctaaaagaaaggtgaggtgcaacttatgaatagtaaaagagtagtcattaccggattaggagctttatcacctcttggtaatgacgtcaaaacaagctggaacaacgcgatcaacggggtttccggagtcggcccgataacaagggtgaacgcggacgagtatcctgctaaagtagccgcagaactgaaagattttaagatagaagattatatggataaaaaagaagcgagaaaaatggaccgcttcacacaatatgccgttgtgtcggcgaaaatggccgtggaagacgcgggcctcgacattaacgaaagcaacgcagaccggatcggcgtctgggtcggttccggaatcggcggccttgaaacgcttgaacagcagttcgaaacatttttaacaaaaggaccgcggcgcgtcagcccgttctttgtaccgatgatgattcctgatatggcgaccggccagatttcgatctctctcggtgcaaaaggggtcaactcttgtacggtgacggcttgcgcgacgggtacaaactcaatcggcgacgctttcaaggtcattcagcgcggcgatgccgatgtcatgatctccggaggaacggaagccccgcttacaagaatgtcatttgccggcttttcagccaataaagcgctatccactaatccggatccgaaaacggcaagccgtccgtttgacaaaaaccgcgacggcttcgtcatgggagaaggagctggaatcgtcgttcttgaggagcttgagcacgccttaaaccgcggagcgacaatctacgcggaagtggtcggctacggatcaacgggagacgcctatcatattacggcacctgcgccaaatggagaaggcggcgtcagagccatgaaagaagcgatcaaagatgcgggtctgtcccctgtggacattgattatatcaatgctcatggaacaagcacgccgtacaatgataaatttgaaacgatcgccattaaagaagtgttcggagagcatgcctacaagcttgccgtcagctcgacaaaatcgatgacagggcacttgctcggggctgccggaggcatcgaagcgattttctccgtccttgccattaaggaaggcatcattcctccgacaatcaatatcgaaacgcctgatgaagattgcgatctggactatgtaccggatcaagcccgccgccaggacgtgaatgttgtgctcagcaactcgcttggtttcggcggacacaacgcaacgctgatcttcaaaaaatatgaataacccgcaatataaacggctgccattttaaatggtggccgttttttttagcgtgcataccatacagatgaaaaaggagtgtgatctaaaatgagtatagcaagcacgtatgaatggcttgaacaggcttcatccgtgcgggaattgccaagctttctcctgccgtattttaaaggcgcttcaaaagcggatgcggcggcgattgtcagccacctgcagatccacggcttgttccgttcgtggacggacggcgaacgtacgatgaagcagcttaaggaaaacggcgtatttcagcatgtcagacgggaagaacagctgctctgcaaaagatggaacgggccggatgttccgattttcatcctgccggtcgatgaaagaaaccgcaaaatccgcgtcgaattcggctcgaaatcaggcctcgcgttcagcgacaaattatttttgtttttatcggccgatcttccccggtcttcaatttctgcgatcatgacacacgaatataatcacgtttgccggttagaaaatatgccgaaagaagaaaaaaagatgacgctgcttgatacaatcattctcgaaggccttgcagaatatgccgttttcgaacggctgggagaagccgaaacagccgcatggacgtcatattactccgaaaagcagcttcgtcatttccaggaccggttcgtaaagcctcatttcgacctgcgccgacacgatggccggctattctccaatattttatttggaaaaggacattaccctgacatgctcggatatgctgtcggttacagtattgtgaaaaaatatttatcggctcgaaaattgaaggttgccgatgttttagcctttccgtcagaagactttataaagctatcgctttaaaatactaaaattatgggattaaattaatattattacaaaaaatcaaaaaactccttgcttttgtaatgattatgtaataatatacaactataaaattttaagataattcagtcatattaagaaaattctaaaaaagtaatatattagttttttgtgatatttaacttctggtctatggaaggggaatctggatgagcgcattgctggaagtcaatgatttaaaaacttatttttttaggaaaaaacagccgatacctgcagtggacggcgtcgatttttcaattaaaaaaggggaaaccgttgcgctggtcggtgaatcgggatccggtaaaagcattacctctttgtcaatcatgggactggtcgagggctcgggcggaaagatcatgagcggctctatcaagctcgaaggacaggatctcgttacatacaaagaacaagatttatgcaagatccgcggaaatgaaatctccatgatttttcaggaaccgatgacctcgctcaatccggttttgacgatcggcgaacaaatcacagaagtgctgatctatcataaaaagctatcgaaaaaagaagccgccaaaaaagcggtagaattattaaagcttgtcggattttcaagagccggcgagctgatgaaagagtatccgcaccgcctgtcgggcggcatgaggcagagggtcatgatcgccattgccttaagctgcaatccgaagctgctgatcgcggatgaaccgacgacagcgcttgacgtcaccattcaagcccaagtgctggaactgatgaaagacctatgcgacaaattcgatacctccatacttctcattacccacgatctcggcgttgtgtccgaaattgcggaccgcgtgatcgtcatgtattgcggacaagttgttgaaaatgccacagtagacgagctattcgacgaacccctgcatccctatacaaaaggactgttaaactccatccctgtcattgaaggctccattgaaaaattaacagccattaaaggaaatgtgccgacgcctgacaaccttcctgccggctgccggttcgctccaaggtgtccgagcgcggtcgacaaatgctggggggcgcagccagacttgaaaacgcgtccggacggccggtctgtcagatgttttttatatgaggagggagaataagggatgacttcatcagctgaacaattacagcccggacaggaaatgaacccgcaagaatcccttctggagctgaaagacgtcaaaaagtactttccgatccgctcagggatttttcagaaaaaaatcggcgatgtcaaagcggtggacggcatcagcttttcgcttaaacgcggcgaaacgctcggcattgtcggtgaatcgggctgcggaaagtcgaccgccggacggacgatgatccgcctttataaaccgacggcagggcagattttttacaaaggccgcgacatttcaagtttgtcggaagaagctttgagaaaaagcgtccgcaaaaacatccagatggttttccaagatccgtttgcctcactgaacccgagaaaaacgctgcgttccatcatcaaagaacccttcaacacgcatcatatgtacaatttcaaagagcgcaacgaaaaagccgaagagcttttagccaaggtcgggctgcacccgtcgtttgcgaaccgctatccccacgaattttccggggggcagcgccagcggatcggaatcgcgcgggcgctggctttaaatccggagcttattatcgccgatgaaccggtatccgcattggacgtgtcaatccaggctcaagtgatcaacctgatggaagagcttcaggaagaattcaatctgacatatttgttcatttcccatgacttgagcgtcgtccgccatatcagcgacagggtcggcgtcatgtatctcggcaaaatgatggagctgacagacaagcatgagctgtacggcaacccgcttcatccatacacgcaggcgcttctgtccgccgttcccgtcactaggaagaaaggcggaacaaagcgggagcgaatcgttttaaaaggcgagctgccgagtcccgccaaccctccgaaaggctgtgtctttcatacgaggtgtccggccgcaaaagcgatttgcgcggaagccgaacctgctttcaaggaagtgaaaacaaaccatttcgtggcatgtcacctttacgaataaaggggaaggccgtcacatattaaatccttgagagggggaatgtcttctttaaaaaacgggggtcaatcgggtggaaagaaggacaacagtttaataagggggaattcataaaatgaataaacgcaaaacaggattttcaattttaagcttgctgctgatcttatcgatttttctaacggcctgcaacagcggcgaagtcggaggggatgaaaaagaaggcaaatctgacgggaagccgcagcagggcggagatctgattgctggatccacaggtgaaccgacgctgtttaattcactgtattcaactgatacagcaagttcagatattgaaagactgatctacaacactttgttagacgttaatgagaaacttgaagtggaaaaccaactcgctgatgaagtaaaggaatcggaggatgggttaacattcgatgtgaagctaaaagaaggtgtcaagtttcacgacggtgaagaaatgacagccgacgatgtcgtttttacttacagcattccgatgagtgatgaatacgttggagaacgcggctcaaactttaaaatgatagagtctgtcacgaaaaaaggtaaatatgaagtgcagtttaaattaaagaagcaggatccgtatttttacaatgttacacttgccagttacggtattctgcctaagcacattttaaaagatgtcccaatcagcaaactcggtgaacacgaattcaatcgaaagaatccgattggaacaggaccgtttaaatttaaagaatggaaagaaggacaatatgtaaaggttgaggcttttgatgattattatgccgggcgtcctcatttagattcgatcacgtataaaattattccggattcaaatgcagcgctgtcacagctgcaagctggagatgtcgattacttggtcgttacaccaggaccagactataaaacggccgagaaatttaacaatgtgaagatggaaaccgatttaggtttgaattatacgtatatcggctggaacgaaagaaatgagctgtttaaggataaaaaggttcgccaagcgctgacacatgcgcttgaccgccaggcgctcgttgaccaagttctagatggagatggggaaatcgcgaacatcccggaaagcccgctttcatggaactacccggataacaaagataagtttaaaacgtttgaatacgatccagagaaagcaaaaaaactgctcaaagaagcaggatggacagactcagatggtgatgggattttagataaggacggcaaaaagttttctttcgttattaaaacgaaccaaggaaacaaaacacgggaagacctcgcggttgttgttcagcagcaattaaaagaaattgggattcaagcaaaaccgcagattgttgaatggagtgctttaattgaacaaatgaacccgccgaattgggattttgatgcgatgatcatgggctggagccttgctacgttccctgatcagagcaacattttccattcgaaagaagctgaaaaaggactaaactatgtttggtatcaaaatgaaaagcttgataaactgctggatgaagctaaaacgttgaaggaccgtgaagaatataaaaaggcgtatgaagatatttacgaaattctggcggaagatcagccgtatacattcttgtattatacgaattaccatagagcgatgcctaaaaatatgaaaggctacgtattccatccgaaagaagatttctataaagccgaagactggtggctggatcaaaaataacgagaatcccttgagggaagtgtagcttgcagcttccttcccttccttcttaatgacttttaaaaaaggggataaaaaatgattacatatatcattcgaaggacgctcatgtcgattccaatattatttggtattacaattttgtcatttgcgattatgaaagcagcgccgggagatccaatggcattgatgatggatccgaccatcagcgcgggagaccgtgaaaaattcattgaaaaatacgggttggatgaacctgaacacgttcaatatttaaagtggctcggaaatatggttcaaggtgacttcggtacttcaatcgttagaaaaggaacgccagtgactgatttgattatggcgaggctgccgaatacgttattgttaatgctcgtttcaaccattttggctctcctcatatcgatcccgcttggagtgctttcagctaggcggccatattctaaattggattatggcatcacattcacatcatttatcggtcttgctgtcccaaatttttggcttggactgattctaatcatgtttcttgctgttaatttaggatggtttccaaccgggggcgttatgactctgaatgccgattttagtttatgggatcgcattcatcatctaattttgcctgcattcgtcctggcgaccgcagatatggcgggactcacccgctacacgagatcgagcatgcttgatgtgctcaggcaagactacatgcggacagcgagagcaaagggttttaaagaaaatcgtgtcgtgtacaagcatgggcttcgaaatggtttgcttccggttattacgatctttggtctgatgattccttctttcatcggcggagctgtcgttactgaacagattttcagttggccaggacttggaaagctgtttgtcgactctgctttccagagggactatcctgtcattatggcaatgacggttatttcagccacacttgttgtcattgggaatttagttgcggatattctttatgcaatggtcgatccgcggattgagtattaatgaaggagggaattgattcatgacacagacaaatccatcgacaccttcgccggagatcacattgcaggaaaatgtcgcaccaaagcccgagacaatgacaaaaatcttttttgaaaagttttataaaaacaagctggcggtaattggaggagttttattatttattattatcctatcagcgatttttgctccggtgatcgctccatacccgccggaacagcaaaaccttctgaataagctaaaaccgccaagtggtgaacatctaatgggaacagacaagtttggccgagatattttcagccgtttactttatggggctcgggtttctttacttgtaggctttgcctctgtacttggatcgattacgataggtacggtggtcggcgcaatcgccggctactttggcggaataatcgacgctattatgatgagactggtggatattgtattatccatacccgacatctttctgttaatcacgctggtcaccatcttccagccgggcatagataaactgattttaatattcgccttgacgagatggacgacgacagcgcgccttgtccggagcgagtttttgtccttgaggtcgagggagttcgtcttggcggcgaaaacgatcggtacaagaaattacaaaatcattttttctcatatccttccgaatgcgatggggccgattatcgttgccgcgacgctttccgtcggtaccgtaatccttgcggaatcggcattaagctatcttggattcggggttcagccgccgatggcaagctggggaaacatgcttcaggatgcacagaactttacgatcatgatccaggcgtggtggtatccgctgttcccgggcctgatgatcctgctcactgtgctgtgctttaacttcttaggcgacggactccgcgatgcgcttgatccgaagaatattaaatgatttatgcagtgtattacagaggaaatattttaacaaaatggaaggtcaatagatttagtttcaatgaatgtatgtagtggacattgaacgaatgtttcctgttagtcgataaagaacactttcataaatgaggtaccaaagggaatatcattcgtaaatctttggtatctcactttgttcaaacagaagcaggtcttccaactcctgaagatcttttggaactgttagatgaacaaatgggcgctgtagcaaaaaaataaatcgctttgttaaatgaatagaggttttaacgatgttaagcgtattgaaaaataaaaactttttatttttgatattagggcgtttggtaaccaatattggggacagtatgtatacagttgcggcaatgtggcttgtgtttgatttatcaaaaagtacattttattccggattagctggttttttgacgatgttcccaactgttttgcaatttttaacaggtccgattgttgataaagtcagattaaataaagttttggtttggagtcaactcatccaagctattttggtgttgattattccgcttttttatttcattggatatttgaacatttggatcatcatgatgattatgcctcttatcgtattcattgagcaatttacttatcctgcgcaatctgccgcactgcctaaaataatcaaaagtcaagatctagttaaagcaaactcacttatgtcattttcatatcaaggtacagatattatatttactggtattgcaggtattgtgattgcttcggcaggagctataagcatatacttagttgactctttcacttttttgttagcggcgctgttttttaagtgcgtaaaattagaacaaaaaaatgagatagaacataagccccgattccacttcaaaaaagtcatacacaattatacaacggatataaaagagggatttacactcattcgtcattccctcattccaaaaatcctcttgggctcgatgatttctaacttcatgcttagtgcgacgattgtgattttgccaagcttctcttcgattagaggaggagaagaatactatggatattatttggcttccatgtcatgcggtttactgttaggttcaatattcgcaacagtgtttggccgattcgcgataggatcacttacgatatacggatttttcatttcaggggttttatggagtatttcggcgatcgccacctcttcatacatatcgattattttatttggtttgtctcaaatatccatcggcgtgacaaacgtcattttcatgtccattttgcaaagcatactgccggaagagtttatagggagagttttttcttttatcgcaagtttgacaagcatagcagctccttttggatctttgctgggagggtttaccgcgtcattgatcggcagcgataaggttttctttataggaggaattgccatgctgtttgtatctgtttattgggtgtttcagtcttctttaagatcaattccttcatcagaaaaaataaacgctaaagaatacagcttttttacaaacgtgttgaataaataatgtgtgaattgcttcattcagtcatcatgattttgcccattgtctggactccgcgatgcgcttgatccgaagaatatgaaataaaaagctgagggattgccgcccttggcttttttttaacggcgattgccataatctcatccgcttggaataaattcctgcccccttgcctatactgtggacaacagtttttattaaaagtgaggggttagaaatgttgtttcttcatgatgtgtgggtgaattggtttgagggagaagaaaatggctacaacgtctgccactttcatgaatggcggaaggaagacagtgttgaattgcttgaccaggtgcctttgttaagggtgtcgtccgttttgtttcactacatagaaaatgatttgtcagagcttccggccgaattattgaacgaggttcatcaaaaagcgtatattcgtaaaaatcatgagcggacacagcttgatcattgtttcgtcgtaacggacggcattggtattctcgcggtcgatacggccggttacacaataccggtaagaaaaagccgcctcattccgagacaggagcagctcgtttatgaaatggtgaaggacgttgaagcggaaacttacgagtttgcaccagagaagctgcaatcttccaaagaataccacattttatctttatcaccggagcatgtcagaggattaacgagaaaagaacgccagctcaaacagctgctgttcatggcgctcgatcagctcaaagggctccaaaatcgggccgagatcgcttattggtacaccgaatggaatccgtatatgtatgaacagatcaagcgcatgacatttgaagaaatctgggacatgcttttcaatgagacgatcgacggatggtcagacaaacacagggacttttgtgaaaatttgattaaaggacagccgttttttgaaaagctttgggaaattgagaatgagtctaaagtcaactaaattaagaatcaagactgccggaagtacggcggtctttttatttgtaaaagcgaaaattctatattgaaaaataaaaaatatgagctgtctttctgacaaagcggtcaatgaaggactggagacatgtgttttgaatcatttattatagaaatatcgtgatccggaggcaagtgaatgcggagctgcggctgttctctatgaaaaacaccttccgattatcgtacaatcggaaggtgtttttggatcagcgtctttttcggccgagtcccatcgcgttttccattttttttagcatcttgtttgctgtttgatttgcgcgttcggcgccttcgtccaaaatccggtccagctcttcagattcgatcaattcgtggtaacggtcttgaatcggtttcagcgcgccgatgacgacttcggcaaggtctgatttaaattcgccgtagcctttgccttcgtattttgcttcaagctcttcgattgaggcttgtccgagaatcgaatagatcgtcagaaggttggatacaccgggtttgttttctttatcatatttgacgattccgtcggaatccgtgacagcgcttttgatttttttctcaagctgttttggttcgtcgagcagggtgatgaacgctttttggttcggatctgatttgctcatctttttgagcgggtcggcaagtgacataatgcgggcgccgaccttcggtattttaacctccggaaccgtaaaaatgtcattatatttcttattgaaacgctccgccaagttccgggttaattcaagatgctgcttctgatcttctccgacagggacgacgtctgttccataaagcagaatgtccgcagccattaatggaggatatgtcaaaagcccggagacgacagcttcttttccggctgatttatctttgtactgcgtcatgcgctcaagctcgccgatgtaggcgacacactgaagcatccatcccgcctgggcgtgtgcaggcacttccgattggataaacagcgtcgcttttttcggatcgaggccgatcgccaaatacagcgcggcaaggttccggatgttctttctcagcgcgagccggtcctgcggtactgtgatcgcgtgctgatcgacgatgcagaagtaacagttgtagtcatcctgcaagtcgacaaactgcttcatcgctccgatatagttgccgagggtgacagagccgctcggctggataccggaaaaaatcgtttttttcatgtgaatccctctttccatttcaaaataaaaaggcccattcttcccttaaaagaaaagggacgaatgaaccgtggtgccaccctgattatttcattatggtcaaaatgaaatcgctttagacgtttgtaacggagtcttctccggctgagcctacttatccgtgttcggtcagctgctccgaagcccattccacattcgccattatccgctcccagcaccgcggactctctttaaatgggaagaaatgtgtactcttcttcttcatcgcatgttattcataattttattatatataaattttaaatgaaagtcgacagccttggggaaaagaaaacgaataccgggctgaataaagttggcgcggcggcatctggttcgatataaagaatggttaatgttatacgtgtaaaacgttttaacctgtaaaacataaactttccttttaatgtggttacgctttaaaacagagaagtgtatttgtacatttggcagaaaacctgacaatcataaatagtttgaataaaaaaataattgaaaattaatattgcaataaattattctattaattataatgaatttgttcacctcggtgttacaggtttcttacataacaaatattcagaaaagacgaaacagaggaaaaagtatggcaagtgggcctattacttttttatgataaatctgaatgttcaggagtaaggaactaaaaaaacaagaaattgggggggtttctctttgaagaagcgtttgtcatttatcagtttaatgctcattttcacactcgtcctcagcgcctgcggcttcggctcaagctccggtgacggcggtaaaaaagacagcaaagggaaagacacattaaatgtcaacattaaaacagaaccgttttcactacatccgggactcgcaaacgattcggtgtctgcaaacgtgcttcgtcagacttttgaaggattgacgacaatcggtaaagatggaaagccggttgaagcggcagccgaaaaaatcgaagtcagcgacgaccaaaaaacatacacattcacgctccgcgacgcgaaatggtcaaatggagatcctgtaacagcagaggattttgaatacgcatggaaatgggcgctcgaccctaaaaacgaatcgcaatatgcgtatcagctttactacttaaaaggcggagaagcagcgaacaccggcaaagggaaaattgaagatgtcggcgttaaagctgttaatgataagactttaaaagtcgagcttgaaaaaccgacaccgtattttactgaactgacagcattctacacatatatgccagtcaataaaaaggtagcagagaagaatgcgaaatggtacacaaacgcagatgagaactacgtatctaacggacctttcaaaatggcgaaatggaagcacagcggaaacatcgtactggagaaaaacgaccagtactgggataaagacgctgttaagctgaagaaaatcaatatggcgatggtcaacgatccgaacactggtctgaacatgtacaaaaaaggcgagctagactttgtaggacagccgcttgaccagatttcaacggatgcgattccaagcctgaaaaaagaaggcctgaacattgatccgttcgcatcggtttacctgtacaaattcaacactgaagcggctccgctgaacaatgtcaacatccgtaaggcgctgacatacgcgatcaaccgcgaagcgatcgtcaaaaacatcacgcaagcggaacagctgcctgcgatgggattagtgccgccggcggtccacggctttgaatccaacaaaggctatttcaaagaccatgatgtcgataaggcgaaagaacacttggaaaaaggcttgaaagagctcggtttgaaaaaagcgtcagaccttccgaaaatcacgctttcctacaacacggatgaagcgcaccaaaaaatcgctcaagccgttcaggaaatgtggaacaaggaactgggcgtagatgtggaattaggcaatgaagaatggaacgtttacatcgataagctccatgccggaaactatcaaatcggccgtttaggctggaccgccgactttaacgacgggatgaacttccttgaaacataccgcgacaaagaaggcggaaacaatgatacgaactgggaaaacgcgaagtataaagagctgctgaataaagcatcaagagaaactgattcagcgaaacgcatcgagctgatgaaagaagcggaaagcatcatcatggatgagctgccggtcgcaccgatctacttctacacaatgccgtatcttcatgatgaaagcttaaaagactttgttctgaccggtacaggtgagatctatttcaaaaccgcgcattttgaataaaattgcatgaaagtatatggggcttagactttccccccatatacttttatttatgaaaagaagttaatagactgaatattcggaggtgtgtaaaattgattaaatatttaggccgtcgtcttgtttatatgttaatttctctctgggttatcgtaacagctaccttcttcctgatgagagcgataccgggcggacccttttcaggcgagaggaaacttccccctgcaattgaagccagtctcaattcctactatggtttagaccagcctctttttaaacaatatctcgattatttagtatcggtagcaaagtgggatttcgggccgtcatttaaatataagggacaaactgtgaacgacttgatcagctcagggttcccgatttcttttacactcggattggaagcgatttgccttgcgctcgctttcggcgtattgttcggcgtgatcgccgcgctgaagcgaaacaagtggcaggactacacagcgatgatcattgcggttgtcgggatctctgtgccgaacttcatcatggccgcgcttctccaatacgtgctggcaatgaagctgggcatgtttcctgtcgcgcaatgggagtcatggggacatactgtgcttcctgcaatcgctgttgcctcgatgccgatggcgtttatcgcccgtttgacgcgctccagcatgcttgaagtgttgagcagcgactatatccgcacggcgcgtgcaaaaggtttgagcacatcagccgttacgtttaagcatgcgatacgaaatgccatcatgccggttgttacatatatgggcccaatggcggcgtccattttgacaggaacgtttgtcgtcgaaaaagtcttcggtataccaggactcggcatgcactttgtcacaagcattacgaaccgagactatacggtgatcatgggcgttaccgtcttcttcggggcaatcttgctgctttgcgtcttgattgtcgatcttttatacggcttaattgatccgcgcattaaattgtttggcgctaagaaaggggagtaagaggatgcagcaaataccaaaagacatgtttgaacctgcagctgttgaccatagcgaagccgaaaagatctcaaagaaaaacctttctttttggacagacgtattcttgagatttaaagaaaacaagctggcgctgtttggactggtggttctgatcctgatcgctctgatggctatcttcgcgccggtgttctcaagctttcaatatgaagaaacagatttaacgaatgcgaaccagccgccaagcggtgagcactggtttggaacagatgaccttggaagggacgtattcgtccgtacatgggtcggcgcccgcatctcgctgacaatcggactcgctgctgcgctgatcgacgttttgatcggtgtgatatggggtgcgatttccggcatcagaggcggacgtacggatgaaattatgatgagaatagcagatattttatgggcgattccttctttattaatgaccatcctgctgctcgttgttatgggaaaaggcctgatcacgatgatcgtggcgatggttattacgggctggatcaacatggcgagaatcgtccggggccaagtactccagcttaaaaatcaggagttcgtactcgcctcaagaacattgggagcgaaaaactcgcgcattatcagaaagcacctgctgcccaacatcatgagcccgatcttggtcaccatgacattaaccgttcctacggctattttctatgaggcgtttttaagctacctcggcctcggggttccgcagccgcttgcaagctggggaacgatggcaacagacggtgttcagggattggaatactacccttggcgcctgttcttcccggctacttttatctgtctgaccatgtttgcattcaacgttatcggcgacggactgcgcgacgctttagatccgaagctgcgtaaataaaggagtgagaaagatgaaacacttacttgaagtgaaagatttagccatttcttttaaaacatacgccggagaagtacaggcgatccgcggcgtcaactttcatgttgacaaaggagagacgcttgcgatcgtcggtgaatccggatcaggtaaaagcgtcacttcacaggcaattatgaaactgattccgatgccgccgggctattttaaaaacggacaaatcttatttgacggacaagacctggttccgaaaacggaaaaagagatgcagtcgatcaggggaaaagagatcggcatgatctttcaggatccgatgacttctttgaaccctacaatgaaagtcggccgccaaatcacagaagtgctgtttaagcatgaaaaaatctcaaaagaagaggccaataagcgggcggtagagcttctcagccttgtcggaattccgatgcctgaacgccgcgtcaaccagtatccgcacgaattcagcggcgggatgcggcagcgcgtcgtcatcgcaatggcgcttgcggccaatccaaagcttttaattgcggacgaaccgacaacggctcttgatgtgacgattcaggcgcagattttagagctgatgaaagacctgcagaaaaagatcgagacatccatcatttttattacgcacgatctcggcgttgtcgcgaacgtcgccgacagagtcgccgtcatgtacgcgggacagattgtggagatcggtacggtcgacgagattttctacaatccgaagcatccgtatacatgggggctgctggcttcaatgccgagccttgacaatgacggtgatgaggaattaatggcgataccgggctctccgccggatttgaccaatccgccgaagggcgatgcctttgcgttaagaagcccgtacgcaatgaaaatcgattttgaacaggagccgccgatgtttaaaatatctgatacacattatgtgaagtcatggcttttgcatccggatgctccaaaagtcgagcctccggcggctgtcaaaagcaagatgaaggagtttaaaaatcagtatgaaaaaccggttcaagtgaaagaaggtgaatgacatggcagaaaaactgctcgaaatcaagaatttaaaacagcacttttcaacgccgaaagggattgtaaaagctgttgacggaatctcttttgacatttacaaaggggaaacgctcggtcttgtcggagagtccggctgcggaaagtcgacgaccggccgttcgatcattcgtttgtatcaagcgacttccggagaagtcttgtttaagggaaagaatgtccacgacaaaaagtctgccaaggaccttctcgaattcaaccggaagatgcagatgatttttcaggacccgtatgcatccttgaatccgcggatgacggttgccgacatcatcgcagaaggtattgacatccacggtttggccaaaacgaaaaaagaacggcttgagcgcgttcatgaactcctcaatctcgtcggcttaaataaagaacacgcgaaccgctatccgcacgagttttccggcggacagcgccagcggattggaatcgcaagggcgctggcggtcgaaccggaattcatcattgccgatgaaccgatctctgcactggacgtgtccattcaggcgcaagtcgtcaatttaatgaaggatttgcaaaaggaaagaggactgacataccttttcatcgctcacgatctgtcgatggtcaaatatatcagcgacaggatcggcgtcatgtatttcgggaagcttgttgaattggcgccggcagatgaattgtatgaaaatccgcttcatccgtatacacaatcattgctttccgccattcctctgcctgatccggattatgagcgcacgcgcgtgcggaagacgtatgatccgtccgtccatcagctgaaaggcgacgaacagatggagctccgcgaagtaaagcccggccatttcgtcatgtgtacagaggaagaatttaaagcctatcaatccaaataaacgaagcaggaagacagccgtcacaaggctgtcttttttgatgcagaaccacagccggcaatttttttgagaaaaaatttgaaaccttagcgtaagacaaccgtcttagtatatgtaggtaacatgctcagcttcaatgaagctcctttctaaaaaagattttgtttaaactaaaaagaaagcgggtatatctaaagtgtgaaattagaacatccataaggagcaaatcaatgaactggtatgagaagcttagcgagtatttccctattgaagaaatgaaatcaaaagagcatatggaagcattgttaaaggaacaaaacgatatttaccataaagaagaaggccgtcatcatgtgttgatgtacgccgaattcgactcttttattttcatcgactatttattcgtttctaaagacgcacgaggacagggacttggatccaagctgattgagaagctgaaaaagaaaaacaaaccgatcctactcgaagttgagcccgtggatgaagatgatgccgatacggcgaaacgtcttaaattttatcaaaaggaaaactttaaacacgctgagtcgattggttaccgccgccggtcactcgcaaccggcaaagtgaacaaaatggagattctgtattggtctccaaaatcaaacacagagaaagaagtgtttgacgcgatgaaagaaacgtacgaaaaaatccatacatacaaagatgaaaaatggtatggagaatcttatgaagatgtggatgacgtccttacgattgttgacgatcataaacagaagaacattttcgatgaattaagctaaatgagaataagacctggcataaaaaagcaaaagtcactggattgtcaaaaaatttctgttacagactgttcacacttacttttttatagtataatactcaataaagattacttttttagagttatttcaatttaagaatacgctaatttcattctactttttaaggagtgaagcaatatggttacattatatacatccccaagctgcacgtcttgcagaaaggcgcgcgcatggctagaagaacatgatattccgtttacggaaagaaatattttttcagagcctttatcaattgatgaaataaaagagattttacgaatgacggaggacggaacagacgaaattatttcaactcgttccaaagtgttccaaaagctgaacgtcaaccttgaaacaatgccgcttcaagagctgtaccagctcatcaatgaacatccgggccttttgcgccgtccgatcatcattgacgaaaagcgcctgcaggttggatacaacgaagacgaaatccgccgcttcctgccgcgcaaagtgcgcacattccagcttcgtgaagcgcagcgtcttgcaaactaaaagaaggctgaatttttcagccttcttttagttgtagacaaaatcgtttagattttgtcaacttttgattcagcgtgatccgaaaacctttgcagtctaggaaggccgagcatcggagcgcagcgaatgttggaattcgtgagcaccgacgcgcaggccctgacaacgaatgcgagggtttgtcggcacgctgagaaggctgaatttttcagccttctttttttaatgcttttcactcgtctgttcataataaatactggctaaaatcacaaaaataaccgtaaggacgggcagcagcatttcgagggtgctgtgctgcgccataaaggaagacaactcctgctccctgacgatcatttcgccgccagtataagccagcagtccgcttcctgcgtatattaagagcggaaatttggcaagagccgcttgaatcagcctgctgccccaaatgatgaccggaacggagaccatcaggccgacaacgacaagcatcaggcgtccgtgtgaggctccggcgaccgcaatcacattatcaagggacatgaacaagtcggcaatcacgatgatgcggatcgccttaaataaagatgtcccgcctttgacatgctgggcatcttttttctcaatcagaagctgatatcctaagtacaaaaggaagattcctccgataaattgcagataaggaaccgcgagcaggtatactgctgccatggttagcgcgattctcatcatgatggcgatcaatgtgccgatgatgatcgctttttgcctttgccggggaggcaaatgacggcttgccattgcaatcacaacagcgttgtcgccgccaagtatgagatcgattccgatgatcacaaggaacgacatcagtatatcgtgttccatccactggcacctcgctttgcctttgcatcgggacttgctaaaaaggcccccgcattaatagctgctgcttgtacaactaatatatgaagcgggccggaaaatatgttagcttgaccttggaggcgtttttatttcttttccgccttttttatcataaaatagaaaataaagattgatcagggataaggttaagaagtggacgtaatgggtaaagtgtagtaaagtacaattaattgggagcttagttatcccttcaacatcttacaaagaagggaaggttggcaaatggaaatcgaaagaataaacgaacacacggttaagttttatatttcctacggtgatatcgaagaccgcgggtttgacagagaagaaatttggtacaatcgagaacgcagtgaagagcttttttgggaaatgatggacgaagtgcacgaagaagaagagtttgccgttgaaggccccctttggattcaagtgcaggcccttgacaagggattggaaatcattgtgacaagagctcagttgtccaaagacggacaaaagctggaactgccgattcctgaagataaaaaacagcatgtagcagaagaaagccttgatgctttgcttgacgactttcaaaaagaagagcaggcagaagagcagaaactgcagtttgttttaaaatttgacgattttgaggatttaatctcactgtcaaaaatgtctgtcagcggttgccaaacgacattgtactctcatgaaaaccgctattatttattcgtggatttcaatgaactgcctgatgaagaggtggaaaaccagctgagcattctgctggaatatgcttcagaatcaaagatgacgattcatatgctgaaagagtatggaaaactgattgcagcggatcatgctcttcatacaataaaaaagcactttgcataaaaaagccggtttcctttgaagccggctttaaccttctccgttacggggaaggtttttttgtgaactttatgaacaaaaagaatattatgcagttaaactgtgcaggaaaagacgaggaagctataatgaaagcgattacaataaagggggagcacaacatgacaaagaggggcagatgttacggctttacgattttacttgtgtttgcgctgattttgggaggatgcggcggaaacacggcttcaaataaagccgcgaatgaaaaagactttaagccttcgaaagcaatcgaggtcgtcgcgcctgccggagccggcgggggatgggatacaacggccagaacgatctcgaaaatcatgggtgaagaaaaattgattgaaaagatggctgtcgtcaacaaaccgggcggcggtggagcgtccggatggtcgtatgtccaccgcaaaaaaggcgataatcatacgttgtttgttacatcaccgccgattttgttcgtgcctttaaacggacaatcccagtacggccacaatgattttacgccgattgcaagcgtgattgccgattacggagcgtttgtcgttcataaagattcgccttatcagtcgatgacagaccttgtggatgcgcttaaaaaagatccgaaagcagcttctattgtagggacgtcttctcctggaagcatggaccacatgcagtttgtcagcgctgttcaaaaggcgggcgttgatgcgaaaaagctgaaatatattacggctcaagacggcgcagggatgagcatgctgctcggcaaaaaagccgacgtctactcgacgggtgtcggtgaagcggccgaacaagcgcgagccggaaaagtcagagtgctggccatcaccgctcccgaacgcatgaaaggagataccgtcaaggatttcccgactttaaaagagcagggaatcgatgatgaatttacggtttggagaggatttatgggacctccgggaatgagtaagtccgccgtaaagtattatgaggaaaaaatcaaagagatgatggaaaaagacagctggaaatcgattcgggacagctatggatggacggataactttatgggccatcaagaatttaaggactatcttgacactcaatataaagaaatgaaagcgctccttgatgagattggattgggcgacaaataaaacggtctccgcgcgcggggttgccggtacgcagagcctaaaagccccgcccggcacagcccgcgaccggcatgctgaaatcgagaaaggctggtgtaaaccatgagaatcacaaaccgggccgtttctgtcatcattttggctgtagcagccatttacctggcgctcagctttaatttagacagctatccgtacgcggtgatcgatgcggatgtgctgccgaaaagtttaggcatattgcttctcatattaggcatatttctgttttttgaaaaagatcaaaaggatacaacggtgaaaaagctgtttcagctgcagaaaaaagacgttaaggtcatgatgctttgtgttgtttctctgttgatctacatttccgttttagaattcatcggatttttgctatctactgtgatgctgctgctcgttttgcccgcggtgttgggatatcggaactggaaaactgctgcgatcgtttccctggttttcagcagcacaatttatttttcattcaattatgtactcaacatcatgcttccgcagggggttatgcctttttaatcgaacataaggagggaagtgaatgttagatagtattttatacgggtttcaggtggcgctgactccgcagaatatcatgttcgcttttatcggagtgctgatcgggacgattatcgggatgctgcccgggctcgggccgatcaccgcgattgccattatgatcccattaagctatggaatggatccggcctccgcgttaattttgatggcgggtgtctattacggagcggtctttggcggttcaacatcatcgattctgttaaatgcccccggagtggcaggcactgtcgcgacatcgtttgacggctatccgatggcaaagcaggggaaagcggggaaagcccttgccatcgctgcaatttgctcctttgcaggcggaacgatcaccgtagttgcgctgatgctcgtcgcgccgacaatggcaaacattgcggtgacatttgggccgacagaatattttgcattgatgatgctcggcttggtggcaatttcgagcctttccgaaggatcgacggtcaaagcgctgatctctgcgacattgggctttatgacggctaccatcgggattgatccgcagacggggaccgaacggtttacattcggtgcggcaagccttctggaaggaatcgattttctgatcgtggcgctcggtttgtttgcacttgctgaagttgcgtttttaatcaagacgcggaacaagccgatgacagagggagcgtctcaggtcggcagcctgaaggtgacgaaaagcgaaatgaaagagatttcgggaccgatcgcaaggcattcggtcatcggatttctgctcggcatcctgcctggtgcaggagcgacgattgcatcatttatttcttatattacggagaaaagaatctcaaaacatcccgaaacgtttggcaagggaaatattaaaggagtcgcagctcctgagacttcgaacaatgcggcaacgagcggcgcattcgtacctctcctgacactcgggattcccggatcagggacaacggccgtcctgctcggcgcacttttggtcgtcggcgttcagccggggccgctcatgcttacggatcatcccgacgtgttctggggcgtgatcgcaagcatgtatatcggcaatttatttctgctgattttaaatttgccgttaattcctttcttgtcaaaaattcttctgattccgaagcagcttttgatttcgctcatatttgttttctgcctgatcggcgtctacgctgtgacatttaatgtcgtacacctttatattctcgtgttcttcggaattctcggatattttatgagagtgctgtcttttccagcggctccgtttattttggcttttattctcggaagtttgatggaagagtcgttcagacaagcgatgacactgtcatcaggaagcctgtccgtgttttttgaaagtcccgtcacaatcggtttattgattacggctctattgtctctcatcgtgccgccgatttcccgggcaatgaagaacagaaataaaaagtcgatcgatttggaaggctaagctgtcgatgtccggaacgctacgtttccggactttcattttttacgggcttgtagcgccgttcgggccgcccgacggttccatagtaaagttctgtttttacatgcttttcggcagctaaaaattctaaatagcgccttgcggtcgtccggctgacaccgatggtgcgcccgaggctttcggcggtgatgccatcgctgttttcgcttttgtttaaaacgccggctacttttttcagcgtcagtccgtcgattcctttcggataatcggctttagcaatttgttctttcgtgatgctccgcctttttgccatcaggctgtcaacgtctgtctggtcgattgaagacatttcatttactttgagccggtaagaccgatagtttaacagcgtttctttcagcctggaaaacataatcggcttgatcaaataatcgacggctcccgcgcgaatcgcctgttcaacatattcgacttccttagccgccgtaatcatcatgacgtctgtatgcctgagcgtttgtctgatcagccagagaagctccatgccggagccgtccggcagaaaaatgtcgagcaggacaaggtcgggcttcacgtccggaagcaaatcttttgcatcttgaaaattttccgcgattccaatgacagaaaatccatcaattttgctgatcagtttttggtggatgtcagcgtttctgatgtcatcctctacgataaatacttgtaatgctttcataggtcagtcccccagcgtttctctattttggtatcacgacagtaaacaatgctccgccaaggtcgcttttgtccgctttaatttgcccgtttaacgcattgacggcttctttaactaaaaagaggccgaggccgcggtggtttgccgtttttgtcgaataaaacttttgaaagatccgctcctgttccccctcgggaataccgtctcccgagtcttcgacttcaattaatatgtgatctgcaccgtctgacaaatgctgcggtcttttttgtgggaaacggcgtcaaaggcattctcaatcaaatttcctaaaatcgtaatgaattttcccttatccatttcgtccggcaaagcgttcaattttgagctttcatcaatttccaggttgatgtgcagctctttggcacggttgaccttacccagcagcaacccggaaagaagcggatctggaatcgaatggatgagaaattgcagcatatcctgatggcttttattctctttttggatcaactcgagtgcttcaggatagctttccagctgaatcagtcccgcgattgtattcagcttgtttgaatattcgtgggtctgggctctcagaccttccgcgtattgcgaagtttgcgccagctttttggagagttcgtcaatatccgtctttctcctgaagctcgcaacggcgccgcggattttttcgttttcgaaaatcggcactctgttgacgattaattcttcgtttccgatcgttaattcctgatctttttgcgccgttttcgttttcagcacttcggggagcagcgtatccggaagaagctcggaaatcggtttgccgagccactgatcttcgctttcgacacgaagcagctcacacgcttttctattcaaaagcgtgatttcttcatgtttattgatggcgatcaaggcctcgtgcacagattctgtaatcgcctgcttttcagtatataattgattaatttcataaggctcaaggccgaaaatggactttttgacattgcgggaaatatagacggctcccaaaatccccatcagcacgacaaatcccaataaaaatatgaattttgactgatattgatagacgatgtcctgaatattttctattaaaaaaccgactgagatgatgccgacgatttcgccgttttcattatggatcggcgctttgcccctgatggccgggccaagcgtgccgacggcttccgaaacgtatgcttcacctttttcaagggcgcgccgattgtctccgccgaccattggtttgccgatttttccagggtccggatgagcatagcgaatcgcatccgccgagccgatcacgatgtattgcgcaccggactgttttctcgcattttctgcaattggctgaagggttcgagacggatcgtccgtttcaaacgctttctgaacggaaggcatgtgggcgagcgttttcgccatatcgagcgctctggcctggatttgtgtttttaaagaattttctaaaataattaaatagaggccgctcatgacagaaagcaagagcaaaagcagggtaagaatcagcaatgtgagcttggtggtcagcttccgtttgatgtcaaaaactccttttctcaaaatttcgagttctataatactactttatataaaatcggcctggatttgaagcgttttcaaataaaggaaagctcccgccaatgttgaatactagatcaaacaggaaggagagataatatgttcagtgcaatgatcgatcaaggcgggaccatctgccttgccgacggatacaaagccgaagatctcaagcgattgagaaaaagacatgcattttactgcccggtgtgccggtgtgaactcgacctgaaaatcggttccgtcaagcttccgcatttcgctcataagccggatgcagcatgtccggtgccccatgaaccggagagcccctatcacctgaaaggaaagcggctgttgtacgaatggcttggcagacaaggactccgcccggtgcttgaaccgtatttgcaagagatcagacaaaggcccgatttgctgctggaacacagaacccgccaggttgcggttgaatttcaatgtgcgaatctcaatgccgcagcgtatcgcaaaaggaccgaaggctttctcagactgggaatcgagcccgtatggattctcggcggaaaccggataaaacgcttgacgggggatttatttcagctttcgcggtttcactggcagttcattcagaaaagcgacaagcccccaaagctcctgtttttttgccccgaacaaaaggctttcatcatcctcgaacacctcattccctttcaaacaaacaaaacatccgcatccttgcgctttcttcctcttgctgaagcaagctggcgtaatgtaacagaacgagaaagccgttcgcctctccagctcaaaggctggaaaaagaacatcctcagctttcggatgtcggccgtgcgttttttatcaaaagaaacgaagcagattgccgccctcttttatgaaaatcatcagcttccgctcccgttttttccctcagaagcctttctcccggtgccgtcaggctatatttttgcccacccggtttatgtatggcaagggtacctttttttatttataacgaagcatgatacatttcgcctgcagtctgcgcttcactatatggactggctcatcaagggcaaaaggctgaagctgagatggagcgggcggcaaacggctgcggatgccgtcggtgaatacatttgttttttgcataaaaaaggatttttggtgaggaaagaggaattttattattccgcgggttcttttgttccggagccgcggttagaggcgctgttaaaaagggatgaacattatttttccgaatgattatcaagcctttcgttcaatctaaagaaaggaaggtggtgtccggactgtttcagatcaaaagatatgtattttattttttaacggcgggattttgtgtcttttttttcgcatatgatttgacaaaagacggtgaaaaaacagaagataaacacaatacaagtttattggataacaatggacttggagtaaagaaagcgaggggattgacagtggctgaagaaaaaaaatcgaagaaactgccttcaagagaagaggtgaagcaagaagacacgtggagactggaggatatcttcccgtcagatgacgcttggaacgaggaatttcaagccgttaaagaactgctgcccaagctttccgaattcaagggcaagctcggccattccgccgatgatttatatgaagcgctgacttatcaggataaggtgatggagcgtctcgggaagctgtatacttacgctcatatgcgctatgatcaggatacgggaaattctttttaccaaggtctcaatgataaagcggcgaacctctatactcaggctgcgagcgccacggcctacatggtgccggaaatattatcgattcaggaagaaaagcttcagcagttcctgttggaaaaagaggaattaaagctttactcacacgctctcgaagaaatcaataaagagcgccctcatgtgcttagcgaggaagaggaagggattttggccgaagcgtctgatgttctttcatctccttccaatacattcggcatgctgaataacgccgatatggaatttccggagatcaccgatgaaaacggagaaaaggtgcagctcacacacggcaattatatcacctttttggaaagcgagaaccgcgatgtccgccgcgcggcattcaaggccgtttatgaaacatacggccgctttaaaaacacgctagcttccacgctcagcggagctgtgaaaaaagacaacttttatgcgaaggttaaacattataaatcggcgcgggaagctgccttgtcgcgcaacagcattcctgaagaagtctacgacaatcttgtcagcacgatcaacaagcatctcccgcttcttcaccgctatgttgagattagaaaaaaagtgcttgagcttgatgaagtgcacatgtatgacctgtatacccctctggtcaaggattctggaatgaaagtcacttacgagcaggcaaaggactatatgctgaagggtctggcgcctttgggggaagaatattcatccatcctgaaagaaggattgaacaaccgctgggtcgatgtgtatgaaaacaaaggaaaacgaagcggcgcctattcttcaggaacttacggaaccaatccgtatattttgatgaactggcaggacaacgtcaacaatctgtttacgctcgtccatgaattcggccattccgtgcacagctactatacgagaaaatatcagccttacccgtacggtaactacagcattttcgtagccgaagttgcttctacgacgaatgaagcgctgttgggagaatacctgctgaatacaatcgaagatgaaaaacagcggctctatattttgaatcatatgctcgaaggctttaaaggaacggttttcagacagacgatgtttgccgaatttgaacatgagatccatgtcaaagcccaggaaggggaaccgctgacacctgagctgttaacgagcatatactatgatttgaataagaaatatttcggagacaatattgagattgataaggaaatcggtcttgagtggtcaagaattccgcatttctattacaattattatgtatatcagtatgcgacaggcttcagtgcagctcaggcgctcagccagcagattttaaaagaaggcaaatcggctgttgaccgctatattgagttcttgaaagctggaagctcggattatccgattgaagtgctgaaaaaagccggcgtcgatatgacgtcttcagagccgatcgaagctgcgtgcaaaaagtttgaagagcagctgaatgaaatggaagaactcctgcaaaaagtcaatcattcataaaaggcgtatgcatgaaagaggctgccggtctaccggcagccttgttcgcgatgatgtcaaaaacctttaaacgttttgcggtggttgaggcggctgatcgtaaaaaggattgatataaataataggggagacgtaatataaaggggtagcatattcatcaaacctaaaatattcaagacgaaaaaaaataaaattgatgcaagtcccaaaatgatctgaagcataaaaaccctcctaaggactgataaaatattaagggggcgacgaagcgcaataagaccggcaaaaccgggcgccagtccgcataattcggggtttggcagcgtgcgtcgggctcgttttctttgttactttgatcatatgatggacatctattatttatgtttttgtgacaaaaatgtgaaaactaatgaaatcagttgtcaaaactcgacatgatttgatattataaagatgtgaaattgatcacaaacaaacatttacccctttgtttgaccgtgaaaaatttctcccatcccctttgttgtcgttaagacataatagaaaccgcgcttatcccggcgcggtttcttactgctttaaagaggaacgtgtgttcgttttttgtgcgataaaaaacacgggagaaacccgtgctatttttcgcattgatagagcggaccggcatcgtgatgttcatttatatagcgccagaacatgccgtgtttcgcttccactctttcgactttgcgggcgaacgcgagctttttcatttcccgttccacctgttcaagcgtccagtcgtaaacgacggcaatctctttgtcggctacaaattgaaagtattcgataaaaagttcgagcggaggtgtttgtgaaggcttcggctcatcgccaagcatttcaaacaatacttcttcgtaaatttcatatgaataatttccggttacctttaagccttctccttcgcggaggctgttgaaaaacgtaagagtcggaacagatgccacttccatttcggcagcgatttttaaatcgcattgcagggctttcacggcgctctgcgaatgaagatcccttttgaattcctccaaatcgagctgcgtgtgctctgcaatcgctaaaagcacctgttcttcagtgatatcctgctgattgagaaacaagctttcctgcatgcatctcaaaaactgcagccctgcttttctgccttgcagttccgctgctttcaaagcgagcgaggcaaggtaaggtgcagagagtgctttgtcgtgcaggagcgttccgtcgcaagacatgcccgacctgcatgcgatcttttcccatgcctctgcgagccggcgctttttgcgtttctgaacgttcagcgctgtaatgctgcatgcggcgatgatccttagtgtgaaaaagcggccgtagcggattttcaactttttgatcgccggctccaatgcccagcattcgggagataaagggtcgacaaacatataaatttccatcggtttttgcggatgtccgtggcaatgggagaaaaattggtcacgctgattgagtgtcaatgtgaaccatcctccattttcggctgatttaccatatgtctggctgtcaatgtcagcctttcaaaaagaaattccctgatttcgccctttaaaccgacatgatccattgcctctttcatacacgaaagccatgcgtccgcccgttccggtgtgatcggaaacggcaggtgccgcgccctcagcatcgggtgtccgtgttcttctgtataaagcggcggaccgcctaaatattgcgttaaaaattgcttctgctttcttgccgtttccgttaagtcgtccggaaaaatcgggtagagcagcggatgccgctttacacgttcataaaaagtatcaacaagttgcgatagaagctcttctccaatcgcttcataaggtgcgttaaacgattgtcccatgttgactactccttttaatatggctaataggaaaatataccgattcctattgcaaaaaaatatttatcttgtgcatcatttattatttcacgattgtatatacttattttagcaacctcgttccatttctacaaacaaaccgacttctgcctgcgggcgaaaatcgctgttttgtttcaaatatcatatcatattcgcttcttaaatgtgtatttttaataccgggaggatgaaagaggaggtaaatgcaggaaaaaaagccggaaagcgtcctttccggcttaagcgtagtaatttgaggtgattttttttacataattttgcgtttctttaaaagggggaatgcctccgtacttttggacatttcccggtccggcattgtatgccgctaatgcgagcttcacatttccgctgtatttatcgagcatctgctttaagtattttgttccgccttctatattttgaacggggtcaaaagcgttattcacgccgagcgccttcgccgtggacggcatgagctgcatcaggcccatggcgccggccgggctgaccgctttctcttgatagcgtgattcctgcttgacgacggcatgaatcagtttctcatcgaccccgtatttttctgcggcgtttttgatgatctggtcaatgttctgattttggccgccgaaagagacgggtttcgctgcggcagatgggacggccgcaattgcctcaggcttttcagctgccagcggggcctgaagctgagacgctgtcgacacagtcggagcaaccgcgggctgtgaagactccaagccgccgacattgcttaaatattggtttaaaatcgagctgaaatcaaaacccgcatcttcggaaccgctgtctgaagccggataaaacgaccgtatcgcctgaagttccaagagagcggccaaatggttgatgttcattgttttcccaccttattgatctttaagtttttgctcataaaatcggacgattttgtttttggtttcacgctcagggatgccgaacgatttcagcagttcagagaaatcccgttttccgcgttcataatccgtcacttcgaattcgatttcaaagtcttctaccattaagtatcggctgtgatccaaaacaattaagccctgcggcaattttttttctgcacggcttgtcgcaagcgttccgaaaaggatgagctcgtccgcttcaatgccgagacgcttcagacgatcgtataccggcccatgcggaatcatgaacgtttcgatttcaggcttccgggtcagctcctggtgggtttccatcagtccgacaggcgccggttcttttaatgtcaggacaaatcgctgctgcttttcgcgaattcttagggcagctcctttttcttttaaagagaaggaaggcgtatcgtaataatggtttttttgtataacaaattgctcggaggaaaattgataatatgatttgattttctcaaattctttttttgtcagcatatttttaaattcgatttcaagttcctggctcattctttaattttttcatcctctcagctcgtaaaattgcattttccttattatctcttgagaaggaacgtttatcaatattgaagctgatatgataaaatgaatctgtacttttattgtaaaggagagcattatgcagaacagaattgagattacagaagccaatctgcgaaacgaccggctggtgttgaccagcgaaatcaatgacggagcggagcggaagccggccggacgcatgctgacagactccgatcattttgcatttgtatacatacttgaacaggacgaatcctttgaatacgtcattttaaacgaaggcatctggtccgatcttaaagcggcccttgacgccggtcttcctgtgtttttacatatcggaaacacggagctggagcttaacgggttccatgatgagctcggatatttaatagagaatattaaagataatgcaaattatggcgaagaaatggaagagagagtgaaacggatattcctctagaaaaaaaggcgatgaaattgggggaaggtttatggatgaaaaacaatgggagcagtttttagcgccgtaccggcaggctgttgaagagctgaaagtgaagctgaaagggatccggaccctttacgaatacgaggaagagcattcgccgattgaattcgtgacggggcgggtgaagcctgtgccgagtattcttgagaaggccaagcgaaaaaacattcctctgcacaacattgaaagcatgcaagatatagccgggctcagaatcatgtgccaattttttgaggatattcgcattgtcgtcgatatgcttttggcgagaaaggacttcacggtggtggataagcgcgactatatcgcggaacataaagagagcggctaccgctcctaccatctcgtcgtgctgtatcctttgcagacaatcaacggggaaaaacagattttggttgaaattcaaatccggacgctggcgatgaatttttgggcgacgattgagcattctttaaattataaatacagcggcaacattccggaaaaagtaaaattaaggcttcagagagcttcggaagcagcatcaaggctcgatatggaaatgtctgagatcaggggcgagattcaggaggctcaggcggcgttttcacgcaagaaaaaggatgaggatgacggttaggggagtgagatggaatgatgaagtttgcggtatcgtccaaaggaaatgcggtttctgattcattgaaaagcaaaattcagacgtatctgctcgacttcggtctcgaatgcgatgaagaagagccggatatcgtcatttccgtcggcggtgacggaacgctcttatacgcatttcacaaatacagcggccgcctcgacaaaacggcttttgtcggggttcataccgggcatctcggcttttatgccgactgggtcccgagtgagattgaaaagctcgtgatcgcgattgcgaaaacgccgtatcaaattgttgaatatccggttttggaagtcatcgtccgctataatgacggcagcgatgaagcgagatatttggcgctgaacgaatgtacgatcaagagcattgaaggaacgcttgtgacggatgtcgagattaaaggggaactttttgaaacgttccgcggcgacggcctttgtctgtcgactccttccggaagtacggcatataacaaggcgcttggcggtgcgattattcatccgtccatcagggcgatccagctggctgaaatggcgtcgatcaacaaccgggtgtttcggacggtcggatcgccgctcattctgcctgagcatcacacttgtttaattaaaccgataaatgatgtgacgtttcaagtcgcgattgaccacttgacattgctgcataaagacgtcaagtcgattcaatgccgcgtcgcaaacgaaaatatcaggtttgcccgctttcggccgtttccgttttggaaaagggtccaggattcctttatcggaaaaggagaataggaaggtttgctgtgagcgattttttgatgaaacagatcataacagaagaggacagcggggttcttttgaaagaatacgtccagcggctgggcatttcaaaaaggatgctgacggacatcaaattcggaggcggcgatcttttggtaaacggcgggcatgtaacggtcagatacgttcttcaaaaaggggacgagctcgtcattcagtttcctccggaaaaaatgagcgaatctttgcaaccggaagaagtgccgcttcatattttgttcgaagatgaccatgtcctcgtcttaaataaacagccatgcatttcgtcgattccctcgcgtgagcatccatcaggcagtctggcgaacggtctgattcattattaccagcggacgggcgtacacgcgaccgttcacctggtgagcaggcttgaccgcgatacatcgggtgtcatgcttgttgccaagcaccgcttcgcccactcgcttttatcggggctgcaaaaaaagggagccgtcaaacggcaatatcgagcggtcgtccacggtttgatcgcggaagagcagggaacgatcgatgcgccgatcgggagaaaatcatcgagcatcatcgagcgggcggtaatcccggacgggcaaaaagcagtgacgcatttttgggtgaacaggcgtttcagcggcatgacggatgtctctatccgtctggaaaccgggcgaacccatcagatccgcgtccatatgagtcatatcggatatcccttgtgcggtgatacgctgtacgggggaacccgcggcttcatcaatcggcaggcgctccacagtgagaggctgacattttttcatccgttcacaatggaagagctgacgttccaagcgccggtgccgaatgatatgagacagttgatagagagctgaataggctctctatttttatggctccatgcggaatctagactcatcataaggcaaagaggagggaacagattcggttgtcagttccgggaatctgaaagcggtcagcctgttgccgaatacacaaccggtatcgatattaattgtatgatgaatcatcctcgggtttttgacgggagtatggccgtatacaacccacggctcgcctctgtaatgagcggcccagtcccgtctcactggccgtccgtctggcagcgtttcccctgtaatatctccgtagagcacaaactgttttacttttccgacaggctttttgccgatgtcttccgctttgatgccggcatgtgcaacgacaagttcgccgttatgcaggatctcgtaaagcggagccttttcgtaaaggcgcatgaaaaggtctctgatatccttctgtttttgtttcggaaggtttctgtattcggccgccgtcgtttccagcccgtgctgcagcttcaccggatttcccttgaaaaaacggtacagcttgttgcaatgattgccgggcacatatcgcacagctccatcttcaacggcccgtcctacaaattcaacgacctccagcgattttggccctctgtcagttaaatccccgagaaagacaagtgttctgttctccggatgaacgggaactcctgatgtcagcgagtagccgagtttttcaatcagcgcaatcatttcgtcatagcacccgtgaatatcaccgataacatcgtatttcatgcgttttttcgcctccagtccgtttgtttttcatatgtatatacattgccccaagccgtataaatcaagcttctgcaactttctccggagaaaatcaggcatattacttttttttctgagcgagcattgttaaaatcaatttttacacctgtgggaaaagagtttcgacggttcttttcccacatgaaaatgtcaaaaatatgccccttttatttttaaaaaagggaacgctaatcatacccggaaaccggttttagaggaggtaccagtttatggagcacacatctgtctcatctttagttgtcgtactgattatcgcatttttaacacccatcctgctgcaccgtttcaggttaagcataccggtggttgtcgctgaaatcatcatgggtcttattatcggaaaaagcgggttcgatctggttgcccagcacgatacttggctcgaaactttatcgatgctcggatttatctttttaatgtttttaagcgggcttgaaatcgatttttccgtatttgaaaaaggtaagaaaaagcagctgcttccgagcggaaaggaagcgccgaatacgtttaaaacggcttccgtcatctttattgccgtctttatactatcgctcggcctctcctacagctttgtcatggcaggatttattgacaacgcctttttaatgacgctgatcatttcaacaatttcgcttggggttgtcgttccgacgctgaaggaagagcggctcatgaagacgaatatcggccagattattttgcttgtcgccgtgattgccgatcttgtcacgatgatactgcttgcggtgttcgcctcaatctacggagacgaaaacagcaatatgtggctgctgatgattttatttgccgccggcgttgttttatacattttcggcagggtatttaaaaagcggccttttgtcgaagtgctgtcaaaaggcacgatccagatcggcacaagggcgatatttacgctgatcatcgtactcgtggcgctttccgagtcgctcggtgcagaaaacattctcggcgcgtttttagccggggtgcttgtttcgctgctttcgccgaacaaagagctcgttcagcagcttgattcattcggctacgggttcctcatcccgatcttctttgtcatgacaggcgtcaaattggacatttggtcgctgtttggcaatccgaaaattttagtgatgatcccgcttctgtttgtggctctgttaatcagcaaagtcgttccggtgctgtttttgaaaaagtggtatgacatgaaaaccgtgctggcttccggttttctcctgacttccacgctttctctggtgatcgcggcgacaacgatcggcgagcgcatcggcatcattgacgcgcagatgtccggcgcgctgattttggtggctgtcattacatgcatcatcacaccgaccggctttaaaaaattaatgccgaaaacggaaagcgaaaaagagaaaaagacgatcacctttatcggcgcgaatcaaatgacgctgccggtcacgcttgaactttctccagaagattatcacgtcagaatcctgcatgtccggcaggaaaagaaggaagaaaagctggcggatccggtgtttgacgttgaagttttgccagattatgaatacgaaacgcttcaatcattcggcgttttccaaacggatatactcgtcgtggcgacaggcagcgaagagcgcaatacagggatcgccctttatgcgaaggagcagaaagtcgcgagaattatcgccagcgcagattccccagacgccgaatcgaggctgaaagaaaacggaattgatacattctccattctgctttccacgaaaacgctgctgcgcgcgcttatcgaggcgcctggcgttatgaaacttttgacgaaccaggatgcgtcgctgtatcagatcaatatgagcaatgagcgatttgacggcgtcctgttaagggagtttccgtttacgggagatgtcatcttcgtccggattttccgcggggttgacagcatcgtgccccatggggatacaaggctgcaaatgggtgacaggctgatcgccaccggttcgcgcgaatatattgcggaattgaaaaaaacgcttggagactgatgcttgaccattttgcaattcgtgataagattaaagtataaactgaatgaacaagaaatgttttccactaggggagtccttgataagggctgagataaaagtttgacttttagaccctcataacctgaacaggttcaaacctgcgtagggaagtggcacggtatttgagtatgtatatatgcaaattccaaaccactttccttgcgggaaagtggtttttttatgttcagaatcgaaggaggagccttgaaatgaagttttcagaagaatgccgaaacagcgctgcaacttggtgggaagggagttttgtccatccgtttattcaaggaattggagacggcacacttccggttgaccgatttaaatactatgtcatgcaggattcctactatttgacccactttgccaaagtccaatcctttggagcggcatatgctcacgatctatatacgacaagccggatggccgaacacgcgaaagggacatatgaagccgagatgtcgctccacaggaaattcaccgatctattgggcatcacaaaggaagagctggagtcgtttcagccgtcgccgacagcgtatgcgtacacatcgcatttgtaccgttctgtcgtcagcggcagttttgcggaaatactcgctgctttgcttccttgctattggctctattatgacgtcggcgaaacgctgaaaacgtgcaggcctgacaacgcgatttatcaggaatggatcgcgacatacggaggagactggtttaaaaaatctgtaacggaacagatcaaccgcttcgatgagctggctgaaaacgccgatgagaaaacgcgcgcgaagatgaaggagaatttcgtcatctccagcttctacgaataccggttctgggatatggcctatcaaaaagaaagctggtcaaaaagcggggtggatcagcttgcatctgcacgcgatcaccgatgacaagcactccgtggaagagctttcagcaaaaatcatctcgattcacgatgccgttgactttatccacatcagggaaaggtcaaaaaaagtaagcgaaatatcaagtttgatcgatcgcctggccgaagaaggcgttgataagcgaaagctcatcatcaacgacagggtggatattgctttgtttcatcatattcaccgggttcagctgccttcacacggcttttccgtcaaaagtgtaagaagccgttttccgcatttgaaaatcggaaagtccgtacattcacctgaagaagcggtgcaggctgaaactgaaggtgcagattacgtgctgttcggccacatttttgaaacggactgtaaaaagggccggaaaggaagaggagctctgagcttggcagaagtgaaggcggctgtccgcattccggtcattgcgatcggagggattaccgaacaacgtctggcggaagtcaaaatggcagacggcatcgccgtgatgtcggggatcttttcccatgacagaccgaatgaggcggccgcgcggcttgccagtctcgcgaagggagattcatatgagaaagcgctatgatacgatcgtgatcggcggaggcatcatcgggacttccatcgcttatcatcttgcgaaagcggggaaaaaaacggccgtgtttgaaagcggggaagtcggcaaaaaagcgacgagcgcggctgcgggcatgctcggcgcccatgcggaatgcgataaacccggtacctttttcgaatttgccagagccagtcaaaaagcctataagcgcctgacgggggaattgaaagacataagcggcattgatatcagaaggcatgacggagggatattaaagctggcattttcagaaagcgaccgcgaacacctgatgcaaatgggtgcactggattctgtggaatggcttgaagctgatgaagtatataaattagaaccgaatgccggaaaaggaattctcggcgccaattttatcagggacgacgtccatgtcgaaccggctgcagtgtgcagggcatttgccaggggagcccggatgctcggtgcagatgtcttcgagtatacgcccgttttatcgatagaatccgaagcgggggccgtccgcgtcacgtccgcttccggcacagcggaggcggagcacgctgtcattgcaagcggcgtgtggagcggagctttgtttaaacaaatcggcttagacaaaaggttttaccccgtcaaaggggagtgcctgtccgtatggaatgacggcatctctttgacgagaacgctttaccatgatcattgctacatcgttccgcgccatagcggaaggcttgtcgtcggcgcgacgatgaagcccggggactggaatgagcagccggaacttggcggaatcgaggagttgatccgaaaagccaagtcgatgctccctgggattgaatccatgaaaatcgaccaatgctgggccgggttgcgtcccgaaacaggggatggcaatccgtatatcggaagacatcctgaaaatgaccggattttgtttgctgccggacatttcagaaacggcatcctcctggcacctgcaaccggtgagatgatggcagacatgatcctcggcaatccggtcaaaacagagtggatcgaggcgtttaaagcggagcgaaaggaggctgtgcacaggtgaacattcagctcaacggccggaaaatagagtggagagacgacggcggcacgatttacgatttgctcgagtcctacaatctggaaaatcgtgttgtcgttgttgaaaaaaacaggcagattatcggaaaagaccaatatcaatcagtcaaactggaagaacacgatgtcatcgaaatcgttcattttgtcggagggggataaaccgttatgttaaaaatcgcagatcgtcaattttcatcaagattattgctcggtacagggaagtatccgtcatttgagattcaaaaagaggccgtcagcgcatctgaatcggagatcctgacgtttgccgtcagacggatgaatatttttgaagaatctcagcctaattttttggagcagctcgatttaagccgttatacgcttttgccgaatacggcaggagcaaaaacggctgaggaagccgtccggatcgccaagcttgccaaagcaagcggtctttgcgacatgatcaaagtcgaagtgatcggctgtgaccgttcgcttctgccggacccggtagaaacgctgaaggcgtcagaaaccttgcttgaagaaggcttcattgtactgccgtatacatcggatgatgtcgtcctcgcgagaaaacttgaagagctcggcgtgcacgccattatgcccggggcctctccgatcggttcgggacaaggaatcatcaatccgctcaacctgtcgttcatcattgaacaggctaaggttcccgttatcgtggatgccggaatcggttctccgaaagatgcggcatacgcaatggaactcggtgctgacggggtacttttgaacacggcagtgagcggggcgaaagatccggtccaaatggcgaaggctatgaagcttgccgttgaagcgggcaggctcggatatcttgccggacgaattccggaaaagaactacggcatcgccagcagccctgaagaagggaagttgacgatttgaccggcaggtattcaagacaggagctctttcacccgatcggaccggacggccaggaaaaattaagccgcgcccgcgtcctcgtgatcggtgctggggctttgggcgcggccagcgcagaaatgctggtgagggccggggtcggttcgctgacgatagccgacagagattatgtggaatggagcaatctccagcgccagcagctctatacggaacaggatgtgattgatcatatgccaaaggccgccgccgctgaaaaaaggctgcgcctgatcaacagctctgttcaagtaaccggaatcgtagcggatgttactgcggaaaaagcgctcgagcttgcggaggaagcgtccctgatcgtcgatgcgacggataattttgaaacacggctgatcatgaacgacgcggcggtcaaattaggcatccctttcctgtacggcgcgtgtgtcgcaagctatggcatcacatatagcgtaattccgggaaaaacgccgtgtcttcattgtcttttggggcatttgcctgcgaataccatgacgtgcgacacagcaggggtgatcggtccggtcgtccagcaggttgccgcataccaggtaacagatgccctgaagctgctgaccgggcatgaaccgtcagggatgctccgctcatttgatatttggacaaatgagcggtctgaagtccgggctgacacgcttaaacatgagacatgtccgacgtgcggaaaaggcgagtttccgtttctttcagctgaaaacgaaacaaaagcagccgttctttgcggcagacaaacggttcagatcaggccggccgcggaacagccgctggaactggaatcgcttgctgccaaattaaaaaaagccggtttaaatgtgacgggaaatccttatttagtttcctgccgtgcggaggattttaagttcgtgatttttcgggatggacgtgctttaattcacggaacgaatgacatcaatcgcgcgaaaacgatatatcacaggtggattggctaaaaggccgaagggagtgcaaacatcatgagcatatataaagcattaacaatcgccggatcggattcaggaggcggagccggcattcaagccgacattaaaacatttcaggagcttggcgtcttcggcatgacagttttgacagcagtcactgcgcaaaatacaacaggggttcacggcgtctacccgctttctccggaagcgctcggcgcacagattgatgcagtggcagaagatttaaaacctgacgccgtgaaaacagggatgctgtggagcgcggagatgattgaggtcactgctgaaaaaattgcagcatatgagcttaaacgtgtgatcgtcgatcctgtcatgatcgccaaaggcggcgcttcactattgaatgaggaagctgttgaaacattgaaacggcgccttcttccgcttgcttatgcggtaacgccaaacattcccgaagccgaagtgctgacagggagaagcattcaaacaatggaagaccgcaaaaaagcagctcgtgacttgcatgaaatgggcgtccgcaacattatcatcaagggaggtcatcagcctgaggatggcaaagtaaccgatctcctcttcgacggagagacgttcacagaaaaaaccaattcctatattaagacgaaaaatacccatggaacaggctgtacatttgccgcggctcttacggcgcaatcagcgaaaggaaacgggattcaaggagctttccgcatcgctgaggctttcgtccacgaagcggttgtacacagccttgattttggagccggccacggaccgaccaaccattttgcatatcaaaagttatccaacgcagggttggaactgtagtcccgcaataagaaagaatcaatatcgcggcagagcatcaaaaacggcctctgccgctttttatattctgaaattgtcagcctgctattaattgtgatactatatattatgatcaggtactaataaaatgttaatcattaggaggatttcatacatatgaatttatcactagaaggccggaatatcgtcgtcatgggtgtagcaaataaacgaagcatcgcatggggaatcgcccgctcgcttcacaatgcaggcgcaaggctgatttttacgtatgcgggcgagcggcttgaaaaatcggtcaaggagctggctgattctttggagcgaaacgattcaatcgtacttccttgtgatgtcactaatgaccaggaaattgaagcatgcttcgccgacatcaaaaaagaagtcggggtcatccacggcattgcacactgcatcgctttcgccaacaaagaagacttggctggcgaatacttaaatactacccgcgacggttttctgctcgcacacaatatcagctcctactctctgacagcggtcgctaaagcggcgcgcggcatcatgactgaaggcggaagcatcgtcacgctgacataccttggcggcgagcgcgttgtatccaactacaatgtcatgggtgttgcgaaagcatcgcttgatgccagcgtcaaatacttggcgagcgatctcggaaaagacggaatccgcgtcaacagcatttccgcagggccgatccggacattgtccgcaaaaggaatcagcgacttcaactcgattttaaaagaaatcgaagagcgcgcgccgcttcgccgcacaacgactccggaagaagtcggcgacacggctgctttcctgttcagcgacctttcccgcggcatgaccggcgaaaacctgcatgttgattcaggctaccatatcatcgcgcgataaaatagcgctaaaaaagcaatccgctaaaggattgctttttcttttcttctgatttctccttttttgcatatagatataccatgaacagatcggagggatcaagatgtctagcagaaaacacgatgcggagcaaaagccgctcatgtatattgtgcagccggactatgataaggcagaggcgaacatgcaggatattctgattaaaagaaagaagaaagcaaagcccgaagcttccgaacaaaaagcgcggcggaaggaacagcaggatgaagccgtccggcccgacgaaaaagacggagctgaagcggtgtttaacgatgaggcgaatcgatccgaaaaaggagtcaaaccgattaaaaagccgctcagcaagatgacgattgccgagaaaatcgactttttggcaagccttcccggcaatatgccgaaaaccctttgtctcattgaagcagacgggaagacatacaggggaacgatcgtcggaaagaagggcgattccgtctttgtcagaacgtcgagcaaaggggctccggcggaactgccgatcgagagcattacctccttgcacccgctcggcttttaaatacacaagataaaaaaagtcccgattcagggactttttaatttgaacgattgatcagttttggatttaagcattcgatcgcacagaagcattccagatcgacttcaatgcagaaacttgttttttccaagcggaacacatcgcaaattttgtctttatcttctgtgaaatcgagaacgcggcgattatcatcaaaggcaatcaacagtctcaatgtagcgcagcagtcatcaatgttttcaactctgaaaaacacggtgctgaagcaaggacctgcctgaagttctccgacatttccaaacgctacgaacggcttagacttagaagtgtataaaataaacggaatggtgtcgcctaagtgtctcgaaggggaaagcaggttgctgaagcagcttgtcgggcagccttcttcctcaatggcgttttgcagatcgtgaatgttttcaacggcttcgcacacgcaattttcggctgaacatttcgtcatgttatgatccctcctagttcaggatttaaaatttcgtttttcggcctggcctttctattggtaaaaggagctgccgaaagccggcagctttcgtgaaaagactggcatcaagccgatcatatcggccggcttgatgcagcctgacaccttttaaccgtggtggtgattgtgttttttgtctgctgcgcgatcaactaggtcaggtgacagacattgaatcgcacagaaacaagtcaagtcaacctcgatgcaaaagtccgtcttttcaagcccgaaaaagtcagggtcacaaggatggcagacgcttaatgtgtcgccgtttatgtccacaggcctcaggattgaaagcgttgcacagcaatctttgagactttctgcccggaagaaaatcgattcgaagcactgcatatcatctgaaaatccgccgacatttccaaatgttgaaaacagtccgccttttttgtcgtacaaaaggaacggaatcgtgtctttaccggaaaccgtcggactcagcaggttgccaaagcagcttgtcgagcacgctgttgtttcctcaacggcatcctgttcttttataatctgttctactgcatcgcatacacaattttcatgccggccatggtgttttccgcagctcatggatttcagctcctttttatagggatatttgactttagtctttaacaacatatgtacccgtgcccttgttggtgtgggtaatcgtctataaaaatgaagaaaagcagagctggttggctctgctttttgaattatagaaggccgacgataagggcggtgatggtgattacaacagtttgaacaaatgtgcttacgatgatagctgtgtctgtatcttcggttgtgacatgtacatttctggaattatcgatcaccaatttttgtctgttcgtttgtttattggcagttacctgcaacagatcagttgtgacaagttcggctagatcaggatcatcgataatggcgagaataatagtaacagctagtgtttgtgcagctgtcatgactgatgccaacgtttgtgtgtcttcagttgagacttgaacatcacaagagtctttaatgatgatcgtttcatctgagagctgtttgttaagatgaagttgatctaggtcagaatcgataaagccattttgccctttcctaccacagttgcaagtatagtcgtcacataattttttcttaggataactagggtgataatcgttgcctggatgttcgcattccgggtcaagcgcaatccatgaatatggtcttgtttccatttcttttcctccttccatttactattattaaatgttgtaactccttaacttgtataagacagataccctactacaaatccccatttttttctgctgaagtatctgactcggttgaattttccgctgttgctgtgttttcttgctccctccgttgtcgaagtttttctctcagtctatttgttctgtttcttcttcttcttggtctctcgccattttctgatgacgcatcagcgttcttttctctctttgtccctttttcattcggtgcggctgctttttctttctgtttttgaaccaaagcatcggtttgtttttttagatcttccagcatattgaaaatattttctttttcttcttctgagagcgtccgaactttatcgctggttactccccgatttttcaagatatttttaacaactgatttcattatcggatctacgttctcttgaagtttttcaaaatctgccaattgtttctcacctcaatttctttaaaaatattagaaagaaaggaaggcttaaagtatgtcaagctctgtgataagcgcgatcagcacttcggttaaaacttggacggaaagcaggatctccagcgaggaaagcgtaatggtgacattgcggctgccgatgactttgatgatgactcttctcctgctttgcagcctgtgtacggctaaaaggtgttctgagacaatgtctgctgtatcctcgtcttcgatcgcaagctgagccgataaaatcgtcaaagagatcacgatggcttgtaaagagagagctgctgttatgtttgccgtgtttaccgtgacatgttctgaatcaattacttcaatgagctggtcatattcccggtgtaattcgtcaaatgtttctgcgtacagcgcttcggctttttcatgaaacgacataactttcactcctttcttatccacactttattaaatgcagaccggtaccatagcggaatgagaaaaacatacatttcagcacccaaatttgctgttttagggaaggcggttccggcatatatttggaaacaggaagggggagccctgtgatacaaagctggtttttattttttttattttctatcgcggtatttcggctgacgaggctgattgtgttcgacacgatcatggcgccgtttagaagcctgtttcatgaagaggttgaagaaaaaaacgaaaaaacgggagagaccgaaacgtatcttgtcatgaaaggaaaaggcgtgagagcgtgggtcggcgagctgctgagctgctattggtgcacgggcgtgtggtgtaccgcgtttttgcttgttttttacgcatttgttccggtcattgctgaatggctgattcttctgctttcgatcgccggcctggctggagtattggaaacgatcgtttccaaatggctcgattgaatggggatttgtcattagcaacttatgaaaagaagactcatataatggcgtataagcatgagaaaggaaggaatgcaatgagacaagtgaaaagaaggcagcaaggccgattaacgaacgcttccagcaatcatcagtccactttctcaaaaaaagtgaagaaaaaaggctgcggatgcggcaaaaaaaagagaacctattaatatcaaaaaaagccggaatgcatccggtttttttgttgccaatttttcttctggtgcatacaccatcataaggaggggaagcgatgaatttatttgaacagctggttgaatcgatataccgcaaacatgatcaaactcaagccggccatgacaaggtgctctttgaacagcagaaggaactggagacatttgaccgctcggccgaacagttcggcaggcagatcgaagcgtttgcggagaatgccgaaaaatggctgggagaggacgggagtctgccaggcatttttaaataatccacagaagccctatgcatcaatccaagccaatcctatcaactgtcatatcgtgtagggagaaaaggaggtgctttagatgggcttttgttgcggaggctacggcggtggctacagcggcggctatggttcaacgtttgtattgatcgttgtcttgtttattcttttaattattgtcggcgcttcttttaaatattagtttttgagttgaagcgaagagggcggcggcagcatatgtgccgggctctcttctttttgagcgggaaaagcacaaggcttttcaaacatgcataagatagcgtatcactcccaaaaaggaggcataggtatggacaatcaatttttcaaaaacatcgaaaagaaaacgggcgtcagcatgaatgacgtcatgcagctcgcaaattcgctgcaaaatgccaacttcaaggatgaaaatacggtccgcagcgtgattaagcgcgtcgctaaattggcgaataaacgggttccgaaggaaatggaagataagattgttgaatccattgtaagcggcaaagaaaaaatggatttcaacacgatcgcgaaaatgatgaacagcaaaaaataaacaccgcgccttccgataaaaggagggcacggtgtcttttattgcagctgaacttgtggattcgggcgtaaaataggctgtaaaaaccttgagcggtatgccgttcttccccttctgaaggaagggacgctgatatacaggcggtcctcggcccgggtcatggcgacatacagcagcctccgctcttcttcaagagcggtttcatcgccttttctcgctgtctccagggcaaagtcatgcggaatcgagccgtcctgcactcccagtatatagaccgttttaaattcaagccctttcgcacgatgaattgtcaaaagctgaacaccgtatccgtcagctttttgcttttccgcggctctcatatgatcgacatgctcaagaaattcggggatcgttttgaatttttttgccgcagttttgagatcccgcagatcgtcagaccctttttcgagcttgttcccttcgtttccgcgctttttcaggtaatcggaaaagcccatcttttcttctgcgaaagagatggcttcaaccggcttcatcgtttttaagcctgggaaaaaaggaacgattttttttattttatcaagctgaaacggtttaatgtcagtcaatttttcaagcgcctgaaccattgtgcaatcttctgtaatcgagagcgctttaagcgtgtttaaagcggactgcttgagaaagagggcgggtaaaatctgctttacggcttccgcgtcatcttgattttggcttaagtagagataggccagcatctgccggacgatcctcctgctgtaaaacgaccggacgccttgttcagccgtgtacggaatggctgactggtgcagacgttcaaaaatggcgcggccgctgctgtttgtccggtataggatggcgaagtcatcaggctttgcgcccatttcaattttttcttggatatcagagacgatcataatcgcttcttcctcttcatcataaggataaaataagagcggtttttggcggtcgtctctcgcggcgcttaatgttttcggaaaacgctttttgtttttccttacgaccatatcggcgcttgccacaatcggatggctcgatctgtaattcgtcgtgaggcggaccgttttcgccttcggataatctttttcaaaatcgagtataaaagaaggactgctccctctgaacgcgtagattgactgatcatcatccccgacacaggtcaggttgttttcggggcttgccaagagcttgatgatggcgtattgaacagggttaatgtcctgaaattcgtcaatcaaaatcgcgtgaaagcgcgtctgatatcgctttaaaatgtccggctgttcttgaaacagctgccagcacgcagatgccatatcgtcgaaatcgaattggcgccgcgctgctttttgttcttcataatgacggtacagccggtgaacccgcttttcccattcgtcttcaagcggaatctgttcacccggaagataagcgttcttccagtagccgatctgctggatcgcctggtcaaccggaaagtctttttcatcaagcccttcttcggcaagggccattttgatgtactgttctttttgccattcccatttcagcaggtgctcgccattccatttggccggatcatgatgataaagaattttgtaaaaaaagctgtggaaggtgcctgtcacgaggcggttcacagtctgcatcggcaaaccgtatagcgaggccatccgctctttcatttctttcacagcttttgtcgtgaatgtgacgagcaatatggcagaaggcgggatatcgagccgggatatcatataagccgctcgcgcggttaatacccgcgtttttccgcttcccgcgccggccagaacgagaaggggttcttcgggggccgtcacggcggcaagctgtttctcattcagcggcacattcggaaagaccggttccggagccgtttctgccgctggagagaaaggagaatggatggaagcttcgcgaggcggcgtccagaagtccgtgtccgccttcttttcctctccgatcgctttgcctttcgggaggcggaaaacgccgctttcagtataatcgttctgtttggtcttctgctctgtcttctcatttaagcaagccgcttcacattgagaaaaatccccgttttcccggtggaaaaaatgcggctcttcatgaatcgacaatttcagtctgagcggcaagccgcaatatttacacgtgatcctgtcttttcttgcttcatcaaagaggaattgcaggtgttctctcgaatatgtatgtatatgaatgtctcggttattgaatcgggcgcatttcaaaaagaggtcctccaattaatgggtagtcgtctggtgtcatgagacaacgtctatcatatcaaatgaaaaccgtttaaaacagtagatttttgggaattaaagctgatgaggaggagatcgaatgggatatttgccgcctgtccgcaatgatcaatatatacagtatgccaatcgaagcatcagccaaaaatcgaactacgcttatatacaaaaaaccgccaatatcccaagcgagcgcgcctaccgcgaagtcgaaaaaagagaggaaaatcagactgcggcttttaggcgggtcgaggaaaaaaagcggaaaaaagcgctcaaccgccgtgttgcgaaaaagacggaaagcgggcgcttcgtcaatgaatccgtttgagagatgaaacaaaccccggcttttataccggggttttcgttattttctgcgcagttttttgagtccgaaatacagaatgatcatagccgccgccccgagcatgatcggagtcgtgtacgttcttgctacattttcaacatggtcccaccggctgccgagctgtacgccgagatagacgaacagtatcgaccacggtatgatggccagcacggtcagacccgtgaattttaaaatcggcattttcgcaatgccggccggaatggagatggcgtgtctgaccacgggaatgaagcgggcagaaaagacgacgcctccgccgtatttctcaaaccatttttcggctgtttgaatgtgatgcttttggatcaataagtattttccgtatttgtataaaaacggccgtccgccgtagtagccgatccagtataaaaacaattgagcaatcgttcccccgatgacgccggcaatcacggcgcctgttatcgtaatcgagccgtttgagaccatgtatccgccgtaggcgagtacgatttcactcgggatgatttcgatcattaaaccgatcgcaatgccgaaatagccaagatcggtcagccacattaaaatatcattcactatgcttcccattttcgttttttctccctgcttttgatttcatcagccgaacgttggagcagccgccgggacgcttccctggcgcccgcgggggaaataagcgaatctcaaaaaccgtccggatgcgctttgtgccattgccatgcgctttgaatgatggtttgcaaatcgctgtattgcggcttccatccggtatcttccaccagtgtccggctgtccgccaccagcactggcggatctcccgctctgcgctcgtccgtttttgctgcaatgcttcgctctgtcatgttttccgcggtttcaatgatttcttttacggaatgtccggcccctgtccctacattataaacattttgcttcagtctgtcttcatataatccatcaagggcagccaggtgggcggaagccagatcgaggacgtgaatataatccctgatgcaggttccgtctggcgtcgaataatcttctccgaaaatggacagctgctttcgctgtcccaaagccgtctgcaggacgaggggaatgaggtggctttcgggatcgtggtcctcgccgatcgctccgtttaaagcggcgccggcggcgttgaagtagcggagggcggcccatttgacaccgtgcgtttttccgacccagtgcagatatttttcgatcatcagcttcgattccccgtaaggattgacaggggagaggggagcagcctctttaatcggggctttctccgggatgccgtatacggcggcggttgacgaaaagacgatgttattgacgccttccttgatggccgtttcgaaaaatgcacaagactttagcgtgttttccctaaagtatatctcaggcttttcgatcgattcggacacaaggcttttggcggcgaaatggatgacagcatcgacatcatgatgtttgatgatggctttgacaagtgccgcatcagcgatatcgccttcgtaaaagctgaccccgctgacggcttccctgtgtccggtagataaattgtcaagcacgacgacggagcggttttgctttgtcaattcgagtacggtgtggctgccgatgtatccggctcctcctgttacgagtacggatgtcattgccatgctcctttctgcgcttctttttttaagacgctctccaggtaggcgagcagttttggccgcatctcgtcccgcatgagggcgatttccgtactcgctttaaagctgcccagcttgtcgccgatatcaaagcggcttcctttcaatttgcgcgcatacatgctttgttcccggcagatttcccttagtgcgtcagtcagctgaatttcatttcccgcgccgcgcttcgtttgttcgagcacagggaaaatcgaaggcctcagcacatagcggcccatgaccgcgatatttgaaggcgcatctttgacggtcggcttttctacaagatcgtcgatttgatacactttgttcttttgcgcggatgtctgaatgatgccgtatttgctcacgtccgctggatcgacgggctgaacgccgatcacttcggtctgatattcttcatatacttcgagcagctgcctaagcgccggtgtttctgacaccatgatatcgtcgccgaggaggacggcaaacggctcatcaccgatgaaatgcttggccgataacactgcatgtccgaggccgatgggctccttttgccggatataatgaatattcgccatatcggcgatctcgcgtatctcttttaacacatcgttttttcctttggccagcaggttttgctcaagttccacagagcggtcaaaatggtcttcaatcgaacgcttatttcttcctgtaatgataaggatgtcttcaatgcctgattggacagcttcttccacgatatattgtatggccggtttatcgacaatcggcagcatttctttcggctgcgcttttgttgccggcaaaaatctcgtacctaatccggctgctgggatgactgctttttttactttcatggttattcactcctggtcttttttatgaatctgtgccgggttcttgaaacacccaaagcttgtttccggtaaagttgatggccattcctgcgactgttgcggacatcttgctgataaaaagggacaggccggctttttgaaaaatgtacagaaggacaaatgtagcgcccgctgctgcaagattgatcatgataaaccggacgatttccgcgccatgcgctttttcttttacttgaaacgtccatgtccgattccagatatagctgtttgccacgcctgccgaataggaaaacaactgtgcggccaggtaggggacgtggagcgacgtaaggaggaaaaacacgacgaaatcaacgagtgtgttcccggctccgactgtcccgaaacgaacgagtgtggggatgttttttttgttcataacggcattcggctgttacctcccgtctattttgtgtagggctttgtaaaagcttagaaacaactttaatagacaatgttgaataaacgataaacaaaagatgaacaaactatgaaatgttttctgaggaaaagaaaaaccgttccgcttaaaaagcggaacggttactttttgaccattttgacatggggaatattcgcatctgaaaattcttcagacacgactttatagccgtgtttttcgtaaaagggaacagcctgtgtctgcgcgttcagcataaattgagacgcgccttgcttggcggcttcctcttcaagcgcctgaatgatcaggttgccgacgccgagggagcggtggcttttcagcacacagattcgttcaagtttgccgtagccgtcgacaagccggagccggccagcgccgatcggctctttttcgtcatagatgacgagatgtgaagattcctgatcaagatgatccatttcttcttccggtgatacgtgctgctccttgataaagacttcctttctaacaaagaaggcgtcttcaagctgttgttgattcttcacaatgacggcttccactggctttcttcacgctcctaaaataaaagtttcatagacggtccatgatccgttgtccaattggtaaagcaggtgaaagcggtcgatgacttcttcgtgtgacgcgtctctcattttcagcgtgccgaggacgtcggaatgctcatcatctgacagcttttgtgcgactgtgacatggggaacaaacgcgtattcgggtttgtcttccaaaacgccgctgtacattttttcatgaagctgcatcaattcctctgtcggttcggctttcatgtaaatgacattattgacgggggcaaaggaactgaattttgtaatcttcagcgtgaccggtttcagctcttttgaaagctctctcaagtgtcggacgacgcctgagatctcgtcttcagacacttcaaaaggcgttcttaatgtaaggtggggcggaattaaagcgtaattcgggtcatagcgttttcggtaggaatttgcaatgtcctgaagtttttttgatggaaatagcacaataccgtatttcattttgttccctccttaaacaattgatatggtttagtatatcaaagatgggccgatatacagagagctacagcattttttttaaagcgggggtgatgagcggctgccagtacgtccatttgtgatccccgtcaaaagctttgaaatcgtagtttgtctgctttgattcaagcaactcttttaattgctcatttggacctgtgaaatccaaaatttgatcatcggtcgttttgacggcggtttccttctcgccgatttggtggcaaattgaaataagctgcagggaatcggactgtttcactttatcgagaacatggcggtctacataaggtgactgcataatgacgttcccgaacatattcgggtagtcaagcgccgtcatgagagaaaccgttcctccgagcgaatcccctatcagcgtcctgcctgatccgacttgatatgtcggatactctctgtcggtgaaagggacgagttcatttgccaaaaaacgtttatacgcttcgaattttgacccttccggatggtatgtaagccttctttcctgtacgtttttgtacggaatgccgatgatgatgcttctttcgatttcaccgttcgccaacagttcttcaacctgtctgctgatgcgcccgagccggaaatagtcatgtccatcctgtgcgatgatcacatgatatttgtaaagcggcgagaaggaggacggcaaatagacgagaagctccatttcctcgccgagctcttccgaaaaaagctttttctcctgaatgactcctgttttcatagccaaggtgaattcctccagaaataatgtttgtgaacgtttccattcattgtaacacgaaattctcttgtgaaagaagcgaaaagggctgccgaactgttcggcagccgtgattttttatgatcgttttttttcgtaccaaggcattgtcggtctatcggagggtatccgtatcgctcacggtacctttttctttccgctgtgaaatcccgccggcttttgccgctttcgggattgttggttataatggacgatgcatcgcagcgcatcttcggcacaaggtcttcccagcagcctttcaattttacgaggcggatgatcaaattcatgcttgatgtcgcctgaaggaatgacagcctaagtcaacggcgcactgcaccattttcggtccgatgaaaggtaccgtttgaaaccgggcgggcgctttgatgtatgcggcgcttttcaaagacgaagcgagcgatgtgcaaggaaggacagatcacatatgccgcgtttcttttttttatcagatgcccccttttatagatacaggtcgaacatgttgacgtcatagccgagctgttttaaataattaaacagctgggccctgtgatggaagatgtgggtgagcgtttccgtcagccagcggctttgggtcatcccttcatcgaggtaaaacggctttgttttttttgtcaaaaaatcctcgtcggagagggaagtcatatacgtttgaaaagcgtcgaatcctttctgcatagctgcagccatttggtcagccgactgcaaagcaccatatttcttttcaatccgggcgatgacgtcctcttccttttcctgcatgatggccaagtcggcttctgggatggccgtcagatggcttgccagttctttcaggcttcgcatgcggtcggcgggccggtaagaccagtcagattccttcacttttttcagaagatgacacgtggagcggatgcccgtctccaattcgtggaacaaatcgccgcgcagcgcttgaacttgattcatttgcttcatcctttccatttgcttttattctaaaagtatcacctaatcctgacaggtcttgtcatgattcttaaaaaaagtcagccgtacctcgctaaaatgtcagcagccttccgtttcagatgaagcttgatttccgcgggttctgttacagttacctcagcgccgagattccacaaaagttctccgaaatactcaagttcagacctggggatactggcatcgatcgcccccgttccgtcatcccgcatggtgaggatcttgaataaatccacatcagccgcagcccgcctggctcctctacgtgtcagttccgcttgcagccgcaccggttcagggcactcgctctccgaatgtttgatccagctgagaactgatggatagggaagctggcgggcctgcccgctgtccgctttttccgcacggaggatgcggtcggcgcggaacagtctgaacgcctgccttttaaagcaataggccggacagtaccagaagccgttccagctgtataagccgataggctggatggatctctccgtgcactcgtcagttccgtcataaacgaccgtcaaaacggattgagtgacggctgcgtcaagaagcgtctctaaatgttcggcggcttttgggcgatgcggattccagaacacgattctgtctttcatcgcatcaatccgctcctgtgtttccgggggaaggtggcggtagaacttttttaaaaccatccgcgtttccgcatcaaaggggagcgatccgaagaactgcaaagattgatacgcgaaaaacatagccgccgcctccgattgtgtgaaaaagagcggcggaagcaccggctcattcagcaaataatagcctccgttcgcgcctgtttcagaatagatcggaacgccgagtgcgctgagctcgtccagatcgcggagaaccgtgcggtaggaaactccgaattccaccgcgagctccccggccgtaaattttcgttttgtatgaatggtcatcatcaattcgattaaacgctctgttttgggcatctgattcctccggttccgtcatttggtttcatcataccatgttcaatataaagaaagatttaaaaatgacccttgaaaaatgtcttgaattaggttaaagtaaagaacaatcagaatattgaagagattcttatcacgagaggtggagggactggccctttgaaacctcagcaaccggtctgcactgacgacgtcagtgcaccaaggtgctaaatccagcaagcggatgcttggaagataagaagaagcgaataatcccccttcttcttatgaagaaggggtttttactttttaaaggatggtgtcatatgactgaacatgtacaaacaacgctggcgcaaatcggcaaccgcagtgacgaaataaccggaaccgtcaatcctcccgtttatttctcttctgcgtacaggcacaaaggaatcggggaatccacaggatttgattacattcgcacaaaaaatccgacaagacagcttgtagaagatgcaatcgcgaaactagaagggggaacgcgcggctttgcgttcagttctggtatggctgccattcagacgatcatggctctgtttcaaagcggggatgagctcatcgtttcatccgatttatacgggggaacataccgcctttttgaaaacgaatggaagaaatacggactgcgctttttatacgatgatttttcagacgaagactgtatcaagtcgaaaatcacggacaatacgaaggcactgtttgtagaaacgccgacaaatccgctcatgcaggaagcagacattcaaaaaattgcgcaaatcgccaaagagaacgacttgctgctcattgtcgacaatacgttttatacaccggttctgcaaaggccgattgagctaggcgctgatcttgtcattcacagcgcgacgaagtatttgggcggtcataacgatcttttggcggggcttgtcgtcgcaaaaggcgaagagctgtctgaggaaatgttccagcaccaaaatgccatcggcgcggttttatcgccgttcgattcgtggctcttaatgagagggttgaagacgctcgctcttaggatgagacagcatcaggaaaacgcgcgggagctcgcggcctttttggaagagcaggaggaaattgccgatgttctttatccgggaaaaggcggcatgctgtcattccgcgttcaaaaagaagaatgggtcaatccgtttctaaaaaatctcaagacgatctgtttcgccgaaagcctcggcggagtcgaaagcttcatcacctacccggcgacacagacccacatggatatcccggaagacatccgaattgcaaacggcgtctgcaacaggcttctgcgcttttcagtcggaatcgagcacgtctccgatttgaagcaggatctcaaagctgcactggaaaaagtgaaaggggaggcggttccgcatgagtcatgaaaactggacgcttgaaacaaagcttgttcataaccaaaataaaacggacggagcaaccggagccgtcagcgtgccgatccagcacgcatcaacctttcatcaagattcttttgacaaattcggcgaatatgactacagccggtcaggcacaccgacaaggaaggcgcttgaagacacgatagccgagcttgagggagggacgagaggatttgctttttcatccggcatggctgcgatttcctccgcctttctgcttttgtcaaagggcgatcacgtgctcgtcacaaaagatgtgtacggcggcacttaccggatgattacggaagtgctgagccgctttgggattgaacatactttcgtcgatatgacggatttaaatgaaattgctttaaacataaaggaaaacacaaaagtcatctatcttgaaacaccgtcaaatccgacgctcggcattacggatattagaggggtcgtcaagcttgccaaggcgcacggctgtctgacgttccttgacaacacgttcatgaccccggcgttgcagcgaccgcttgagctcggcgtcgatattgtgcttcacagcgcgacgaagtttttaagcggacacagcgacgtattatcaggccttgccgtcgtgaaagacaaaaagctcggcgaagaactctataagctgcaaaattcgttcggcgctgttctcggcgtccaagactgctggcttgtgctgagagggctgaagacgctccaagtgcggcttgaaaaagcaagcaggacggctcagcagctcgccgaatttttcgaaaaacatccggccgtcaaacaagtgtattatccagggctgtcttcgcatccgggtgcatcgatccacaaacaccaggcgaacggcgcaggtgcggtcctttcttttgaacttgaggatgcggaagcagtcaaacaggttgtggaaaatgtctctctccctgtcttcgccgtcagtcttggagctgtggagtcgatcctttcttatccggcaaaaatgtcgcacgccgccatgccgaaggaggagcgcacaaaacggggcattaccgacggacttctgcgcttgagcgtcggggtcgaaaatgccgatgatttacaggcggactttgcccaagcgttggaagccgtatccggagcgcttgcccgttcataaaagaaggcgcggattcgtcaaggaatccgcgcctttttttgccatttataacagggtggaaaaccatgtgcccaagaaggtgccgacataattgccgatcagatatccgaacgtcccgaccagcattacgggagcaacgaggccccgccagcctttggcaatcgccatcgccgccgctgtcgtcggtccgccgacagatgcgttgcaagccaagagaatttcatcgagccgaaaacgaaacagctttccgcagaagagcgatacgagcaggttggacatggcaatcacaaagacaaatgccaggaggagcggggcgttcatgaggatgatccgcaaatccgccggaatgccaatcacgacaaagaataagtaaatcaaataagtcccgatctcctgtgagccgcgcagccgttcaaaatagcggggaaacactaccgtcagcaaaattgtcagcgtcgtcagcagcaggaactggtcgcccagaataaaggcaagaaactgaaatccgccgtcagaagaaaaacgttccttgaaaaaagccgctgcttttacagacacagcaacgatcgcaaaggcggttccgatgtttaaagcgatgtcctgcaaggagatgtcttttctcttccaataggcttccgcctgattttcgcggccgcccgccacttcctgaacgccgaagcgtttttgaaaccatgttagcgccggtatccccattaaaatgaaaaaaagaaaagccatcataaaattatccgcaaccaccgtcgatgatacatactcaccgggagttgagaacttggcggccatcgctgcaaaattcacgcctcccccgatataagaggcgctgatcatgccgccgattttatcaaggtgcggaatctgatccttaaacagaaaaaaagcaatgacgcttccggccgcagtgcccagcgcgctgatgcaaaacatcatcaaaagtctgccgctttctttcaggatcttccgcacattgatttgaaaaagcagcaaaggaatcgcaagcggaacaacataggaccacaccgcatcatagaagggcgactcggccggaagaatccctgcattagtaaacagcatcgatccgcccagtgccaatacggcccccgatacagcggcagcccagcgaaaccgctgctctaaataaatactcacagcagcccacaccgcgataaatccccaaagcacccacacgtcatccggtgaaatcaatgaagaattcataaaaaaaccccctgtttccggttagtgttttgaattatctgataattaaatagtgtaaaacggaatgcctaattgatcaatgatcataaaaaaggtcaccatgttgacaaaattgcagaaagagggtattgtacatttgtcagcatgttgactatattcaaaggagagaacaaatggatatcaacggcttaatcaacgaattacatttgatgcagcaaagctatgcgacattgttttcggttgtcaataaggtgcaaacccgcggtgacgaatatatggaaatattaactgccaggcaacacatggcgctcatcgctatcgcgcatttgccgcctgaaactgccacgcttacgaatatctccaaaaagcttggcacaaccaaacagaccgccaacaagctgatgactggtctggtcaaaaaaggctatgtcaaatcagtgccaagccaaaaagacaaacgctccattaatattgaaatgaccgctgaaggaaagaaagcgctggtggagtgttccgaaaggtccgtctatttcctggccgacttgtttcagcaatttacatccgaagaggttgcgacattttggcggctgttgcaaaagctttaccgttttgacggtgaggaacatgacggttttgaggagaatgcaaacattcagcttggcgtggggaattcgttagatacagaaaggattctcggagaatttgagaaacgccgctatggaggagaaaacgatgaaaagtgatctttatgtaaaagcaacaacttttaaaatcaaggcaaagaagaagttctatcatgcaaaagataaattccgccagacaaaggaaaccattcgccgcggcacaaaattagacaggacaggcccctttttctcaagctgcattgctctgatcattattggatgttcctgggggacaaacgcagaatggctcgtctggttaggggccgcaagtcttttaagcaacgttttattgctgtttgcaacattttttcgccgtaatcaaaagtcaatttgacattcattgtgcgtctaatggatcgtatcgtagatcaatcaatgacttgcgacaaggatgttcagaaacttattgaattgtagaatagtgatttcaaagacaagaagccagtcttgtctttttttagttgaaacctcatatttccatatgcgtataaagaaagggaggtggaaaagtgaaacagaacaaaagagaacaacttgttaacctgtttagtgtgttaaaagaaaaaggtcagatcaacgcggcagtgctagtcgctgaagacggagacattctttatcaaggcgccttcggatatgaaaacttggcagataagcgtttattgcaggaacattccttatttgaattagcatcgctatccaagccgttcactgctttgggcatccttcaattagcccagcaaggggaattgaaaatcgaggatcccgtagaacggtggataaccgggtttccctaccagggcgtaacgattcgcgatttattgacacatacgtcgggtctgcccgattatatggagtggtttctacaacattgggatcataacaagattgctgttaatcaagatatcgttgatatgctgatgaatcatcatccgcaacgctattttgccccgggtgaaggttggctttacagcaatacgggatatgtgctgcttgcggttatcattgaaaaggcatcaggtctgagttttgcagaatatatgaaaaaaaacatctttgaaccggtgaaaatgcggaactcaagggtttataacagaaggctgcagcctgaaaccattgagaactatgcgtatggatatgtgtatgacgtgcatacagcacagtacgttctgcctgatgaccttgaagaaacaaaatatgtctgctatcttgacgggattcagggggacggaaccgtaaactcaaccattcatgacttatatttgtttgatcaagccttatatacagattgtttgatcaatcaagtctcaaaagagcttgctttttctcccgcgtctctgaaaaacggagagtctatagattacgggtgtggatgggtgcttcgggatagtcctgaaacagggagaattgtcggtcacagcggcggctggccaggctattcaaccgtaatgatccgatatatcgatcagcaaaaaaccttcatttatttgagcaatgtggaacaggatgatgaatatgaacaggccatctttgaagccgttgaaaatatcctgtttgacaaggcctacaaaatccctgatcgccctgccgataaaaagaaaaaagagatcgatccggccatttacaaaagatatgtcggaagttattcacttcaggatggcaccgccgctgatgtgacagttgataagggccggatttatatgcaaatcaccggacagatccgttttgaattatttccagcctcggaaacgcgcttttttctcaggtcattgtctgttgaagtggaatttattttggaggatggtgtcgcaacccggttgattatttatcaaaatggcgcagaggaagaagcggtgcggatagtggaagcaaacagcaaggtatgaccgttttgtttgagcgtttggcggcctgtgtctgttgtctgtcagaaggaaatttatcgtttgaaggttgactatgcaattcggggatatctgcccggctgaatttcctgatgagcatcaatcggatattcatggtaaaggtgctccatctataaggaggttaatgaggctgaacaaatttaacctgttgaaagagccctgggtgatgaatatagtggcatgatcattttgggataaagcgtttatatggaactgctaaagcaacagaaaaaaccaagcagaaaacatctgctcggtttaataactaatacttcggccagcctttagaatcccagtttaaatcattgatcagcagcttaggcgccccgttgtcaagcgcatcataaccatgtctgacgatgatgttgccgttcacgatatccgcgccgcccgggcccttccactggtcgtttccggagtcgaggattgtgcctccgccttccgtcattttcttgccgcttttgtcatagtaaggccccgtgatttttgtcgagcggccgtaagcgatcttatacgtgctgttcacaccttgacagcatttatcgaacgaaacgaataaataatagtagccgtttttatatgtgatagacggcgcttcaaccgctcctccgttgttcggccttgatgcgatggaataaaccttccctgtaggtttcatcgtttttttatcaagctttgtcagcttgatgccgctccaaaacgagccgaaggacagccacggatttccttctttatcaatcactaactcagggtcgattgcattataattgttagaggtcgtcgtccggatgacaagcccgtcgtcgcgccaatttccggatgagattcggtctgttgaagccagtccgatcgccgaagtattggagccgaacgcggataccgcataataaagccaatagcgtccattataatagctgatatcaggcgcccattggttttcttcatggttcggcacgtactttttccaccatgataatggagttgcaaatatgcttggcgctgcgctccatgtttttccgtctgtcgatttgatgacgcggattccattgccgatacccgtgccgaatgtataccacgtatttccttctttaatcatggaaggatcatgaataatgttgtctccttttgtatcccaaaaagccgctgatgttggttcagccgccgagaaaataagcagaaaaaataaaataaaaccagaaatgatagtcttagccacagttgttctcctttcaaatttcgatgtctttaacattcggccctcccttttgtgaaatatttcccaacaagacgaactttattttagcagggattggctgtctctcaatcagccaaaggacttgttttctagtcctaaaataaaacgaaaaaaccagaaaatatccatattaaaaaaacaatcacctaaaagtcatttcatcgtctgaatgtaaaagggatgatgtaattattttggcttatattggaacattttaggttaggtgaattatcaaaaactttgagatgttcgtggagaaaataaaaagcgttggaagaagaagcacggtctcccctcgaatattttcattagccccggaaggtgaatgacacttttagttgatttagtgggttgaaattgataatatgaatttgaagatagactgtcaaaataatgcatcacaaaagacgcaggcgcgtcatctacgtacggtttattaaacgttcaggtgtattttttctataagaaatgcataaaataaaaaagacccgactgcgccaacagtcgagtcgagtgtacaaagcggcccaacaagggcttggctcagtcattttaaaatagactttccctatgaactttaccagggctcaagggaagtctatttttctttcttcgacaacacggcaattaacatgccaaaagcaatcattaacgagattgtttcgaatgtcgtcataagcatcaccccctttcataggggatgagccagcttcccttgagtgagccgaaactttgtacaaagaatattttaccatacctctttcaaacactgaggctgttttttgatgttgaggcgggatagaggagaattaaataaaacgaaacacaaaaacggcaggaattccattggaaatcctgccgtttcgatttggtatgattccgactgggctcgaaccagcgacctctaccctgtcaaggtagcgctctcccagctgagctacggaatcatgatatgtaacactgggtatttgtttcgctgacaagttctattatatgcagattaggtggattcgtcaacagtttttttgattttttttgagaactgggaaagagtcttgcagtacgccgcgcgttatgaaaatattgtcttatatagaaatcaaaagggagcaggaattggatggatctgatacttaaaagtgttgatagtattttaatcgtatttttagcaatcttttttatgtggaaattcgtttatgaaattaaacatgagaagcggaaggctgttatcttgcttttgctgctcatcaatgtctattttattgtaaaagtgttcaatctcgtgttgcaattgatgtagcgaatataaaatgcagtcaaggagaccgaaatcaatgaaaacagaaaagcaaaaaatgctggacggagagctttatcatgcttctgatccggtgctgtgccatgacagactcaaggcgcgcaaaattacgaatgaattcaaccattcgaacgaaatcgacgacaataaaaggaccaagctaatcaaagagctgtttggatcaacaggggaaacgatcctcatcgaaccgtcgtttcgctgtgattacggctttaacatacatgtcggggaaaatttcttcgccaattttgactgtgttttcctcgatgtatgcgatatccggataggcgatcattgtatgctcggaccgggtgtccatatttatacggcgtcccatccgctcgatccgtccgaaaggataagcggtgcggagtacggaatacctgtcatcatcggccggaacgtttggattggcggcggcgcggtcatcaatcccggcgtcaaggtcggcgacaatgcagtgatagcttccggagccgtcgtcacaaaagatgtcccggataatgccatcgtcggcgggaatccggcgaaaatcattaaatacgttgatagcaaaaacaccaattctatgtaattggtgtttttattttgccatagacgcggtgaatgtcggggctgataaaatatccgcgggaagcagtttcctcccgcggatttaagtgctgctatcgggtgaccgtaatattgttgatgacaagctgtcccaatgaattgagatacgaaaatgtcgctttgcctgggcttacggcctttacgtatacgcggtccgaagtgattctgacggtaatggcgctgccgctgtaggagacgttcgaaatgccgacgtattgatcctcctgtccgactctcatctgcctgttgatgacgatcgcctgaggggcgatgattccttgtgcaaatgcgtgagaagagagattttcagtcttcgagagctcctgggcctgtacatgcatgggacttcccgaaacagcaaggatacccgccagtaatgatgaagcaactaaacttttacctaaccacttcataaccatcatctcttttcctatgtgatggttccaggatatgggattgttgggcggcagtcaattggctccaatgatgattcacacattggacatacgaaaaaaaacattttgtgaagcggcaggaaaaacgactcattatttcgaagatgttcttttgttcaaagcgttaataaaggttttcacatttttcttgtcctgcatgacaggtgaatatatataggaaagcgtcctgttaaaggtttgatttttcagccggataacggaaaggtttccgtgctgtacatctctttcaatgacgcttccagacaggagagacagtccgatgcccgtcatgagcgtttctttgatcccctggttgctgctgatcgtcagaaacgatttcacttttaaaccgtttgaacggatgacatggtttaagtattcgcgtgtgcctgagccgacttcgcgcgttacccacgtttgattttgcagatcggagattgtcacgtcctgtttggccgcaagcggatgatcgcttgaagcagcgatgaataattcgtcctgcataaaggcgtgtacagaaagctctttttcatttgtctgtccttcgatcaagccgatgtccactttgtacaggcggacggattgcacgatttcttccgtgtttccaatgacggccttgagctcgagttcaggatattccttttgaaggtcgaagaggagcgaaggcaaaatatattcaccgattgtgaagcttgcgccgattttcagctcgcctttgatcgagttgtggtgatcgagaatgtcctgcctcgtttgttcatagatggtgatcatttgtttggcgcggtcgtataaaatttcaccggtcggcgtgatttttaaatatttcggagagcgttcaaataatttcgtctggaattctttttcaagatttttaatgtgcatgcttacgctcggctgcgacatgagaagaagctcggccgttttcgtgaaatttttgacttctgcaagggtaacgaatgtcttcagcgcatcataatgcacacgaatctctcctttattaaaaatcttaatagctgtgataattaatatatattttactaatgttgagtattccagtaaacttttaattagaatctttttttaggaatatttggtttgaagcaggatgacgccgcgcggcaaaggggacgtgatgagtgagcgcttacaatgtttcttagcagcaaaagccgtgatcgacagatgctttgcgtcaataaaaccgatttgatttataggaatagtggatatatgatgagtattatccttttccgtttcaaaacaagtcatgatttttttattccttagtgaggtggatatcgttgcaacttcaggtaatgaacagtccttttaatcaggagcaggcagagctcctcaaccgtcttctgccaactttgacggcatcacaaaaagcctggctgagcggttatctggcagctgtgcaaaccgccgatgccgcggcggctcttgaaacattgccggcggaagctcctgctgcaagcccggctcagcctgtttccaaagaagtgaccattttattcggatcgcagacaggaaatgcacagggacttgccgaaaacgcggctaagacgcttacagaacggggatttcaagtcaccgtctcttcaatgagcgattttaagccgaaccaattgaagaaactaaaaaaccttctcatcgtcgtcagcacgcacggtgaaggggatccgccggacaacgcgctgtcattccatgagtttctccatggaagacgggctccgaagctcgatgatctccgttattctgtgctggctcttggcgacacgtcgtatgaatttttctgccagaccggaaaagagttcgaccagcggcttggtgagcttggaggcacaaggctccatccgcgcgtcgactgcgatctcgattatgatgagccggctgcagcatggcttgacggtgtcatctcaagcttaaacgaaggacaggaacagggcgcaagcgccgcacctgctcaaacggcagctccgcaagccgcgggaggagtaacagtatattcgagaaaaaatccgttcagagcggaagtgctggaaaatttgaatttaaacggccgcggatcaaataaagaaacgcgccatcttgaattatcgcttgaaggctcaggtttgacttatgaacctggcgacgcgctcggcatctttccggaaaatgaccctgaactcgtcgatatgctgctgaaagagctgaaatgggatccgaatgctgccgttgctgttgatcaaggggaaaacctttctttgaaagaagcgttgacttcttactatgaaattacggtgctgacaaagaaattcattcagcaggcggcagaaatcattgaaaatgaaaagctgcgcgagcttgccgctccggaaaatgcggatcaattaaaagcgtatatcgctggccgcgacctgattgattttgtgcgggatttcggtccgatcgcagcagctccgcaggaatttgtatcgattcttcgaaaaatcccgcctcggctttattcgatcgcatcgagcttcgctgcaaatccggatgaagtgcatttgacgatcggtgctgtccgctacaatgcgcacggcagagaccgaaaaggggtctgctcggtattatgtgccgaacgtctgcagcctggcgacaccctgcctgttttcattcagccgaataaaaactttaagctgccggagaatccggagactccgattatcatggtcggccccggcacaggcgttgcgccgtttaggtcatttatgcaggagcgcgaagaaaccggagcatcggggaaatcgtggatgttcttcggcgatcagcattttgtcactgatttcttatatcagacagaatggcaaaagtggctgagtgaaggcgtgctgacaaaaatggatgtcgcgttctcgcgggatacggaagaaaaagtatatgtacagcatcgcatgctggagcacagcaaagaattgtttgagtggcttgaagagggagcggctttctacgtttgcggcgacaagaacaacatggccaaagatgttcaaaacgcattgcttgaaattatcgaaaaagaaggcggcaaaagccgtgaggaagctgaagcctacctcgcagaaatgaaaaagcaaaaacgttatcagcgcgatgtatactgattttgattgaaaggggactttttcaacatggggaacgaaatattaaaagcgcctgaaggcccgccgagcgatgtagaacgtattaagaaagaaagcgattatttgcgcggcaccctgaaggaatcgatgctcgagccgctttcagccgggatttcagatgacgacaaccgtctgatgaagcaccacggcagctatttgcaggatgaccgcgatctccgcaatgagcggcaaaagcagaagcttgagcctgcgtatcagttcatgctgcgcgtccggatgccgggcggtgtggcgacgcctgagcagtggcttgtcatggatgagcttgcccggaaatacggaaacggaacattgaagctgacaactcgggaaacattccaaatgcacggcattttaaaatggaacatgaaaaaaacgattcagtcgatccattcagccatgctagataccattgcagcatgcggcgatgttaaccggaacgtcatgtgcacttccaatccgtatcagtcagaaatccatcgagaagtgtatgaatggtcgaaaaaactgagtgatgacctgctgccgcgcacacgtgcgtatcatgaaatctggcttgatgaggaaaaagtggccggcacgcctgatgcggatgaagtcgaaccgatgtacggaccgctgtatctgccgcggaaattcaaaatcggcatcgccgttccgccgtcaaatgatatcgatgtattttctcaggatcttggttttatcgcgattgtggaggatgacaagctcatcggcttcaacgtcgcgatcggcggcggcatgggcatgacccacggggacaaagcaacgtatccgcagcttgccaaagttattggcttctgcaagcctgaacagctatacgatgtcgctgaaaaaacgattacgatccagcgggactacggaaaccgttcggtccgcaaaaatgcccgcttcaagtatacggttgaccgcctcggcttggaaacggtcaaaaacgagctggaaaaccgtctcggctggagcctcgctgaagcaaagccttatcatttcgagcataacggcgaccgctacggctgggtaaagggcgtaaaaggaagatggcactttacaatgtttgttgagggcggccgtgtcactgattatgatgattacaagctgatgaccggcttaagggaaatcgccaaagttcataccggcgatatccgcctcacagccaaccaaaacttgatcattgccaatgtcacaagccaaaaaaagaaaaagatcagcgagctgatcgaacagtttggcttgactgacggcaagcattatacagcgctccgccgcagctcgatcgcatgcgtcgcactgccgacgtgcgggttggcgatggccgaagcggaacggtatttgccgaagctgattgacaaaattgatgaaattgttgaagaaaacggcttgaagaatgaagaaattaccatccgcatgacagggtgcccgaacggctgcgcccgccatgcgctcggcgaaatcggcttcatcggaaaagccccgggcaagtacaatatgtatctcggcgccgcttttgacggcagccgtctgagcaaaatgtaccgggaaaacatcggcgaagaagaaattttaaaagaacttcgcaatattcttccgcgctatgcgaaagaacgcaatgaaggagaacgtttcggagatttcgtcatccgcgccggaattgttaaagaaacgacggacggaacgaattttcatgactgatgagcattttaaaaaaacgcctcagcccattgattggtgctgaggcgtttttcttttttacgaaaatgcccggacagtttccgactctatgatcattttcataaactctgcagccgcaggtgttgcttcttcaaatgagggtgttatcatgccgacttcgcggataatttgaggagagatgtcttttttgatcaaccgatgggacacggaggaaagcgagaagcttgatatcaagccgattcccaaattgttatgaaccatattgaccaatgtttccgcgttttgcacagtcaggttttcttttaactcgaggcggtgtttttgaaagatttgagataccgcgatttcgtgcccgcctttacaaaaaatcaattcattttgatattttttcagatcaatgaacggtgcgtcttttaagtggtgatattgctcaggaatcacggccgtcatccggtcttgaaacaatacttggctttcgaatccgtcaaagggagaggcgacgattcctaaatcaaccatacgagtttcgacccattgcttaatttggtcggaggttccctcaagcagttcgatttgtacgagcggatactttgatctgaaggaggcgatagcctgcggcaaaatatttgctgagacggcggggaaggagccaaccttgactttccctctgagcagatgattttcttgatcggccacttggtatattttgttttcaatcacgatcatctgtctcgccagtacgacgatttcctttcccgcgtccgtaagctttatcttgttttgtttatcccgaatcaataatttgaccccgagcgacgtttccaagctttttacggctttgctcacggccggctgtgaaatatacagttcgttggctgcttctgtcatattcaaagtctctgcgactttcacaaagatgtgaagactgttcatgtttataaccaaatggttatacccccgatgataaaaatgtatttcagttatatctcaatatagcatatgctgaacatgaaacaaagaagaaaggtgacggattatgtttaaagtacttttggggatcatctctgtaacgctgatttgggggtatacctgggtgacgatgaaaatcgcaatcactgacattccccctgttttattttcggccctgcggctgttcattggagctgttcctttgtttgtgattctcttgatcaaaggaaggaaacgttcaataggaaaggagaatatcaagcattatctggtgatgagtttattgatgggtttaggttatatgggggtgttaacttacggcatgcagtttgtcgattcgggaaaaacgtctgttttggtgtacaccatgcctatttttgttactgtcatcagtcattttaaattaaacgagaaaatcaatgtgtataaaatgctcggtttattttctggtctgatcggtcttttgtttatattagggggcgggattctgcatgttgatcaaaacgtcatatttggagagctttgcgttttaatcgcagcgctcagctggggcgtcgccaatgtttacagcaaactgaaattcaaaaatacagatatgattcatatgaatgcatggcagcttctcacaggagcggtgatgttattgattttctcttttatactggaaccgtcccggccgattcactggtcaaatgaagcaatcttgtctctattgtttaacggtttattctctacggcttcgacgttcgtcatttggttttggatactgaatcaaatcgaagcgtcgaaagcatcgatggctttaatgtttgttcccgtattaggccttttgttcggctggctgcagctgcatgaaccggtcacattcagcatcctgatcggcgcattcatgatctgcatcggcatttttatgaatacttatcaatttaaaaaggtgtaaacaaaggcagaggatctatatggtaatatgaaatgggagggagatttatgaaaatcgaacacatcgccatatggacgaacaatttagaggaaatgaaagatttctatacccgtttttttcacggaaagacgaatgaaaaatatgtcaatccgaaaaagcatttcgaatcatatttcatccagtttgaatcgggaacacggcttgagctgatgagacgccccgaccttgcaaaaggagaggagaacgcttccggctatgcacatatggcgttttccttagggtcgcggcaagaggttgacgagatgacgagccgctttgaaaaggaaggataccaggttgccggaaagccgcgcgtcacgggagacgggtattatgaaagcgtcattctggatcctgacggcaacatcgttgaactgaccgtttgacggaaaaaagctaatgtccgtttttagacattagctttttcgtttagatggcagcatcgagctgattgattttccatttgttgttttctttcacaaacgtgatctttcttttcgcagtcaccgatccatccaatgccggtacggaaaattcataagtgcgggtattgtttttttgagagatcagtttgatctttgccttgtcccatcctaagaggttgtccccatcgccgacaggcacggccatttttcctttataagaaatgatgttgtatttttcaaagccttttttaatggcgtcttttgtgaaaaccggcgtcaagtagtctgttaattttgcttttgtgctgaattcactgcacatatacgtatatggaagaccgcggtattcaaatgttttggatgggcaagttgagtttttcgcttttggattgtggccgctcatcgtattccaaaagtgctcccgtgcctgcaaggttaattgcatgacttgcttatttgttaaattccctgatgtttgatttttcgctgcgagggacgctccggcaggcaagatcagtaaaacagctaataaacaaacgattaactttttcaatggtcctctctccttaaatatatctcttatattacaaatgttacaataattacagatagattacaagaggtttgcgagaaaaattttcctccgctgttttcttatatatgacgacataaaagcagccggggttatggtttgtccaggaaaatattttatgtccattgattcgtttcccggatttctctcctcataaacatagaagcctcatgttgaaaaagtattttatattgaaaaagaattctatctgggacctcgccgggagcaggaaagaggatcactgaaacatcaatgaattatattgttaaaaatcagaattttatataaaatcaaactttatcagtaaaaaaactgtaacgaaattcgcatcaatctgtcatagcggtgacattttgctgtgttacgattttccctgttagtttcaaaagggctaacaagggaggatttaacttatgaagaagacaatcatgtccttggctgcagccgcggctatgtcggcgactgcattcggagcgactgcctcagcaaaagaaatcgaagttcaaaaaggagacacgctctgggggatttctcaaaactacggaatgaacctcaaggacttaaaaaaatggaatcagctttcatcagatctgatttttccaggtcaaaagctgaacatttcttctcaagaagaaaaatctgaagaaaagcagtacaccgttcagccaggggacacgctctcaaaaatcgcaaaagagttcggtgtgactgtaagcgatcttcaaaaacggaacaacctgaagtcagacttgattattgcagggcaaacgattgcaataaacggagaagcggcagctgcagcagcgcctgtgaaacaagagtccgctccaaaacaaaatgatcagcctgtcaacgtacaaaaggaaatcacagtgaccgcaactgcgtatacggcaaatgacgggggcatttcaggcatcacaaaaacgggagtcgacctgaatgcgaaccgcaatgcgaaagtcatcgcggttgatccaagcgtgattccgctcggcacgaaagtatatgtggaaggctatggcgaagcgacggctgaagacaccggcggcgccattaaaggccataaaatagacgtatttattccagataaaaaagacgctttcaattggggcgtcaaaaccgtaaaggttaaaattttaaactgatataaaaaatgcaggaggcgttaattgcctcctgcatttttttgtcgaacgatgtttatgctgcatgctgttccgcgcgtctgctttttacaaaaaccgaaatcgcaagagcggcggctgcaaaggcgatggctacgaaataaaccatatgaacgccttctgtcatgccttgcatgtgcagctcctgacggctgcctccggaagagtgcgcgataaagcgattcgaaacggttgtcaggatcgtcgtatacaatgccggaccgattgcccctgaaacttgattaactgtattcattatcgccgaaccatgcgggtaaagcggtttgggcacctgattcaaaccgagcgtcataatcggagccattgtcaacccgacgccgagtgtaaagccggcgtagagcatcattccgaccgccatcggcgtatcgcttgaaatattcgtaaacagcgaaaggacggcaatcacaatgatcaatccggtgatcaacagcggtttaaagccaagcttatcaaacaggcgccctgcaacaagggatgtcatcgcgaggacgaggccgcccggcagcatgagaatgcctgtataaagcggtgacagctcaagcgccatttggaagtaaagcggcaaaatcagcatcatcgaaaactgcagcatcatcacgatccacatcaggataaccgagattgaaaatatctttgaacgaaacggcctcatatcaagcatcggcacttccaatctgagctggcgcatgacgaacaatattaatccgatgacaccggccgccagtccgatgatgactttcggactgctccagcccgctgcttccccggcgttgctgaagccgaaaacgatcccgccaaatccgacggtcgataaaagaattgataatatgtcaattttcggatacgtcagttcggttacatttttcaagcggaacgccgcataaaaaatcatgaagaccgatactggcagcatcatgaagaaaacaacgcgccatgaataatgttcgacaatatagcctgagatgaccggaccgatcgccggagcaaataagataacgagcgtaaggatcccggtcatcgttccgcgtttttgcggcggaatcaaagtcagtatcacattcatcacaagcggcaatatcaggcctgtacctgaaccctggatgatccgtccggcgagaacgagcgggaagaccggagcaattccggccagcaaggttcccgctgtaaaaagcgtcatcgcagacagaaacagctgccttgtcgtaaagcgctgcattaaaaacgcggtaatcggcacggcgatgccgatcatgagcatatatccggttgacagccactgggctgtgttcgctgaaatgccaaaatcgtcgatgattttcggcaaagccacattcatgaccgtctcattaatcagagcgagaaaatttccgacgattaagattgcgataatcatgaaggagccttttctagcttgttccatttgtattcccaccctttatgaacgttttagcaaaaaaggaatttgttcggcggctgcactgagaggccggccgttttttttcgtcactgagagcacatacgcaccctcaatcatcgcttgtatcgcgacgctcagcgtctcggccgtttccggcgcatagcctgactggagcagtttttcctgatagacaagctgccagtcttgataaacctgttcacacgtttggcggagcctttcactgaacgaccacgtttctgcggcgacggatacgatcggaatatcgtcgttttcttcgatgatgtattcctcgattccgtcagccatcatctggatataagattgaaacgccttgacaggatcagcttcaccgctgatcgctgacgatatatacgctttgattctttctccggttaattgaatcgcctcttgcgccagttcctctttgccgccggggaaataataataaagcgatccccgcggcgctccgctttcggctgtgatttggcttaagcctgtggcatggtagccttgtttgcggaacaatcgtgaagccgtccgcaaaattttgtcgcggctgctcattttttctgccattctatcattcccttatgattttatactgatcggtctatataattttaacgaaaaaaaagaccttttttgaaggcctgttttaaaataaggacgatttgtccatattcggttcagcgggaatccgctgaaggcttcagaaagccggcaagcagcaggcgccacagcaatcgctgccaatatcgacaaaaggctgtcagatatgaagtgaacaaaagcggaattgatggtatagagtgcgagcgccgttaaataaacggctaaaaaaacatagccgaacatttttctgcggaacggtcttttgagttgaatcaaaagaaacaatccggccattaaaatgataaacgtcacagttattctcccttcgcaggaaagtttctcaatcctcgtatgtccggtttctttctttgttgtcttcaaatgccagatgaatgacgaataaaaacagacaggcgatgatttcgacatccagcgggatggtgatgctgtccatcaattcatcagcgagatggatggcaagccaagtaaaaaaacattcgatcataaaggtcgcagctttatgcccaatcataaagctcagaattttttccgggatttcaaacagcgcgccgaggccaaaagataaaaggatataccagaagagcgaccagggcgattcgtatgtaacgccgaaaatcgcaaaaaaaccggcgacgccgaaataataagacccgaaaaagagcgtaaacacagtgaggatcaaaagaaagatcatagtcactgcgaacatggtaccgagagtttttttaatcattaatcattcattcctaatcatgcagtgtatattcatgatatcagaaaaatatccggttgtgagttataaatgagattttggggttaaagtttgtgtggatgggggagtgaagagagcgttctgaaaaattcctaaggtgtttttcgagacctaattaatcaccatatatcatatttggagcgttttcataagggctgcaatcaagaggataggatcccaaataaaaaaggctgccaaccggcaaccttactttgttaagcatatttcgtatttgcttgttcttaaaccgacgtgtttacccgaagaatcattttcgtgccttaggtgattttcgattttggttcaattgcttttttgaatctcatttgtattgtctattcattttcatcttgattagattcaaggtattgctctaaaaattccttatcatcttcatcttctggccagagtcctaaatatttgtgttcccatacaattcttctttcataatcatcagcatctgataaatcctcatagtcgtagtcgatattaaattcaccatcactgtgaatgatcatagagagactcgtccaagtctcttgatcactattcttaaattcgtaccatagcttttctaagttattgattaattgtctccaaagatttcgataggcttctttttcaatcctaaaaaattcagggatattatgacaatataccggtgaatcatttccttcaggataataataaaagaatcctttttgcacatcttcaagaatttctccataaatcaaaatctttgaccattcctctggaatagtctcaactactgtctccgcaatttcttgatatatcgtgtttaattgattttcatccattggctacttacctccaggcttattatcaaatttcacaacttcccattcccgttttccgattttatattctatctcaaagcttgccggtctttgggaattccctttgtatactggctgtattttaacctcaactgttcttcctttttcgaggtgtttggcccacatgttctcaagctttttccattctcctttatttaagttaccatccatcggcacaaggttgtcaagctttccagacccttcgaatatacttgcaatgagatgaccgccctcatcggtttttaatcgatcttcacggccggcaattctttgggcgtatttgtttctctttgctgctcccaaatttagtttgccgctgacatttgtaatacgtcctttatgatcagttttataagtatagcctacaggcgttgtatccggttttaacacctttcttcttttgactcttgtgaaatggtcaccatatttcactttatggatggtttttgagtctactttaatgtctgtttttgttttggaagaaacacccgcaatgatgctgaccattcgatttcttgcttgttttgcttgatcagaaatctttttggtttgttgaattaatttatctttcaatcgagatccatctatcgtattgaacggaactttaccagcattggctaaagctagttgaagagaagcgatttggactttcggagtgagatttttaatatctttaaaatccctgacaactttatcagctgctttcttacctgcctttttcgcactctctatgcccttgctagctgtctttttagagacatcctttatcttagatgcggcttttcccatcttgcccgccttagccaacttgctaactttgtctgcacctttcgttccgacaatggatgacgcaaccattccggtagcgtatgtaaaccatctcgccctgctttctgcatcaccattgatgacgtccctcacgaaggagtcctcgatatctttctttatgatttcaaatgtttctacagggtgggtgactgtgtaggcaatgccctctagcgtttcttttggattggttatggtatctcgtattcctgtcactgtatcgacggccacatcttctattccttcttcaatgccctgcttaatacgccccatgataccactttgttttcgttttcgatttatagtgtaaaaatagtaattttgctgcttttctgtcagattttcaattccaatctcttgtgcaatctcaacaaattcatcaggatcaatgacattttcgagcttttcctttaggtgagagattttattaacctgtttgttagcttcactaacttccttttcgagttttgatctcttatcgagcttagccaacataacgcccatcgctgtttcctggtttccactcaaggtatccattttatcctgttttaaaatagaacctttctgatagccggtgatttcaattttagggcctgtgtacattttttcaagcctagcgatgtatctttgcattgtttctaagtcgttttcagcggctttgatggtgttcgtctgctccctgtcgaatgtatgtaatttttcaattgtctgattgatttcttttaaagctttcgagtaattctcgtgaaaattactgtcatctaattccggcaaatcgactatatggctgactttagcgattgtagcattcgttttagaaaccaaacgcttcgtggtgcgatcggcatctttcactccttgttccagctcattatcgaggaaggcttgcgaaatatatccattgtgttgtggctccagggaattcaatgcacttttgattttcttcaatgctgattgatattcctcgataaaagtttcaaaaaattgaaggaatggggtgtgacactctttataaaaattccgtattgcgtcgccgccttttccttttaaggcatcgttgagcgacgtgataccttccacgctttttttaatgttgacgatttcttccgattgttgctttaattgttccaccgtttgatcaatcgctttgtgcagcgcctgaacgtccagagtcttcatggcattctcctctaatactaaagttgcaatcattttagagtttaccactttacggaagggtattggtaaatacatcctgtatacccaataaaatgaacctttcgatttaggtttatatacctactagagatttcattatcctgaaggcaacatatttacaaccgctgcgactcccggtacactacataaaaacaggacaggcaggtgcaaaaatcgaaagatgaagcgggctttaactgaccaatacggcagctttacagagatggcagaaaacgaaatagaagggaccgattattcggtggctgctcgggatgcagggagcgctctgcttgtgatggctccccacgggggcgggatcgagccgggcatcagtgaaattgtcaaggcttttgcagagggcgcttcggtttatttattggaaggattgaaaaggcgcggcaataagagccttcatgtgacaagcgctcattttgactgcccgcttgccttgcgaatggctgcaggacaccggtacatactggcttttcacgggtatgaggagcctgctcatcgacatacgctcatcggagggacagatcgaaggcgcgccttgatgtttaaggagacattggagaggcacggattttctgcggagctggcggctgaaaggggctatctttcaggtacaaaccctgcaagcatcaacaatcgctgccaaaccggtttaagcgtgcaatttgaaatcagcacagcccagcggaaggcgatgtttgagcaattcacattaaagggcaggcgaacgtctcaaaatgaggtgttttcccgctatgtcaaagctttgaaggaaggagcatgcatcgcatatgggccgagtgcagccggcagctgagccggctgtttttttattttctcagcatataagccggccggctttccgcagcgaccattttgccgaggccgtttgccgctgcgtacgggcggcgggtttcccgccggtagcgtgcaagttcgtctacttcttcaaagcgtggtgcattcgccgattcgctctcttgggaaaggcttgccatccacgcctcatgaaactggattccggcctgccgtttttcaaagagctcgatccgtttgacagcgaacgactccgtgactttaaagaggtcggcgatcattttagcggcttggcatcgcagctgaggaaaatccatttttaaaagcataaaagtagggacgcaaaaatggtacataaattgattggcctggaactcctgcagctccctgaacatctgattcatgtaaagctggtttccggcgtgctttaatacgtggcacagctcatgggcaaagtcctcccactgcttttcctttgaaaggctgctgttgagaataatgctgtacatgccgtcatgcttaatcatcatgctgttgacattttcatagtgaatccaaatattaaaatgagcggctatgcgattcatatcaatctggtgaggttcaaaaaaaccgaacttttggtacatatttttgacgtattcttctaggtgagataaataaaacttcaatacgagacaccctttcgaacgaatgttctgtttttagcgggaaagaaaagcccgtcaaaggggctgtcatgatttcatgcagatctatcatatacgatgagcagccactttagcaaatctttcccttttttattgtcttatctattaaatcggcgctcaccaggtaatgtttaataaaaattccttatttatccgttttgtttatctccgggctttcgtttcttctctttttcttttaagtattgaatgaactcgatggcctgctgtctgctttcgggggaaaattcctgcatgtcgcggtaggcaatttgcagatccggatctgcgatttcgtcttcgatgttttttttcttttccgtgcctgtcagcagatagtctatcgtcactttatagtaatcagcgagtttttttaatgtttcatagtccggctcgcttcttccgttttcataatgggagtagcgtgcccgcgatacaccgatctgctttgccacttcttcctgtgtcctttttcctctcaggctcttcagtctgccgcctaacatagaatgacctctcttcctcaattcggcatgtttatctctattatagatacaaaatgtatcgaaataaacatatgataaaaaaagtatcaaaaaagtattgatgataagaagtgtatcatatataatcaaatcatcagatacgtattgtatcaaaaacagggagtgagaacatgtgcgaaaacgattgatcgaagagcgctctaagaggggatggacccagaagcaagtgtcggaaagacttggactctccgaggtttatgttcgcaaaattgaaaggggaacacgcaatcccggcagagaaacgatgctgaaattcgaaacgctttattcagtgcctgatcgtttgctgtttcccgatctttttcaggcctttatagatacatattgtatcaaagaaaacctgcatgaaagaaggcgatgtcatgaatcttgaacatccgatggtcacacgcatccgaacacacggctatccaaaggaagccgacagagagcaaatgagaagccacggcggacttgccggatatccaaaaggaggaagcatgggtaaaattgtgatttcctacagctcagaccggtttgatcaatggcggctcggagaagccgggggattcatcgcttttacgaaagacggaaagcctgtattccaatttgatcataaaggccaatacgaacggtatctcaggctgaaccgcaaaaggcagaaggaagggggaagatgaatgtcccgcccgccggatcaaagctatcccttttcggtttactcagggcttttaacacctgttcactacgagaaaataggcaatgccatttggctttttttatggtgcatcagttcaacaacaaaggaaatcgaacgcgatggggagacatggggcatcgtgctcggcaacaagccgctgaaagcagccgaactggctcttcaattcggcgtcaacgaaaaaacgatcagaagatggctcgctcttctcgaacgaaacggctacattgcagtcacaagagcgccttacggaatgattttgtcagtcagacattcaaaaaaatttgcctacgccagccatgtccgaacagaactgcctgatcggacagaagagactggcagtgcggacaagcttgtccaatccaataaagatatcacacaaatcaacacaaaacataatatgagttccataaaaacaatagcagaacgatttgccgccctcaggtcgatgcaggaaggaaagcccgtccatccctcgtcaaaagactatcaggccatcgcccggattgtcgcccgcggagtgtctcttccgcaaacaatcaaatggcttgaacaatgttttgaggagtatgaggcgcggcgccgaagccgtcatgaaacgatcaaggtcttcagctactgtgaaaaatatatcatcggccggctggctgaagcggaagcgaaaacgaaaacaactgtcaggagggagaacaatgcccaaaagaacaatcgaagaggtcatggacgaactgagaaacaggagccgtcaatcacaggggggcaaaccggaagaatccgccgcaaaacggtatgactgtccgaagtgcaaagatgaactcggatttatcgaacggcgcggaacgatggaagtatgggtatcatgcgtctgccgcgaatggcgcaaagcgcaaaagctgttgaagacgagcgaaatcaccgaacaatttaaaaacttaaactttgctcaattcaagacggaaggaaagcatcaatctgtaaaagaggcgtatgaatgcgccgttgaatatgtacaagcttaccgggacattcaggaaagccgcagaaacagcatcgcgctcttgggacgacccggttcagggaagactcatttgctgacggctgccgccaatgagctgatgaggaagctttttgtacccgtcctgtattttccgtttgtcgaaggattcaatgatttaaaacaggacttttcgttgcttgagaataagctgaaccggatgaagcaagtcgaggtgctgtttcttgatgacctgtttaagccggtggcaggcaggccgcgggcaacggaatggcggatcgaacagacatatgccgtcgtcaattacaggtatttgaaccataagccgatcatgctgtccagcgagctaagcgttgaagaaattgtcagcatagacgaagcgctcggaacgaggctggtcgaaatgtgcggggactttctcgtcgtcctgaacgggagctctttcggcatcaatcatagactggaggggatggtttgatgtgccggctatgtaatgggagaaaatcaatccatcaggacgcaagggtcggaacgattttccgcgcttgcccgaactgctgcactgaaagcggcggtttgacggatgtgatcaaacatctggaagcgctgattgcaaaaatgaaaacaagggtgacacaaggtgcttaaaagtttaaaagctatgattctcatcatctggacagcggcaaaaagagacgcacaaattaaacgatggcacgaagaagacggaaagtgaggaaagacatacgtgaaaaacgaaagtgaggcgtacagcccatcaccatggcgcgtcgtcagaacaaataccgacgtatacatttattcagcatacagcaaagccgaaaagaaacggtttccttattccaacggaagggtgattgccaaagtcgccgactacagcgcatattccaaggaaaaaaatgcccgcttaatcgctgcagctcccgaactgttgaccgcagtgaagctcacgcttgcctatttgaagcgaaaacggcccgttcacagcgattcagttgagaatcaattgaagaatattttagaaaaagtcgtcgcaaaagcagaatttgaagaggaggaaacaagatgaaccatccggcaaagttaacagatatcaacgatacgacggttgcaagccgcatcaaaaaaggaaaggtgacggtgatcgtccttgacggaatgaacggcacggcatggcaggccgaggcgcctgagcacggcaaaaccgtcattgaaacgagaaagggagatctcgcaaggatcgaatttgaaatcggctataagctatagctctacaacttgaatatttgtccaagacggaaagcctgcggacgctgatcaggatgcacatcttaactgtgcggctgattggtgtccttttttatttcaaaaaaacggaggtacattaaaatggaagatttgcttttcgaatataaaagagcgctgaaaaacacgaaaaaattgtataagccctatcaagatgaacaagggctgacggctgaacagctgaatgataaaaaactgatcagaaacatgatgaccgatttggaatatgtgatcgactggcttgaaaacggaagagaacctggaatcagacgggcgattgacaggcgcgactcttataagcggatgctcctgaaagatccgcggatcatcgacacgttttcagaacagagtgcatttgaaccggctcaggaagtgtcagcatacgataaagcccggattgaatcagcgctgtctgcccttacggcacgcgaaaaagaaatcttcattttacataaggtcgaacagttttcctatgagcggattgccgccatgctcggcatcaaaaagtctactgttcaaaccaatgtgaaacgggcgcagctgaaaatcgcgaaacagatcgaaaagcctctcgattgtatggcataacgatatatctgtcttttgtcatacgtttgccacctataagtgaaaagagaaaaaatataacaaagcatactgttcatatggaagattcatatagcgattaaatattactgtttccgagaatgagaggcggtgaaaatgaacaatgccaaggaaaagggatccaaaaagggatgaagcttttcgtctctatcaaaaatacgggggaaacattacgaatctcgcaatcgcaagagaactcggcgtttcaaataaaaaaatcagcgtttggaaaacccgcgaccgctggcaagaggctttagccggagatgacgcgaaccgtggaaaagcagacattcacaatgaagggctgaatgaacggcagcggctgttttgcatctattatgtgaaaagcttcaatgccacccaagcggcggtaaaagcgggctattccccggccagcgcccatgtgacaggctgccggcttttgaaaaatgaaaaggtggccgatgaaatcaggcgaatcaaaaaagaaatggtaggggagatattcgtcgaggcgatggatgttctccaagtctatgtaaaaatcgcgtttgccgatatgaccgattatgtgactttcggcaaaaaagaggtacaggctgtcggaaagtccggaccgctgtttgatgaagaaaacaatccggttatgaaagaggtcagctttgtggatgtgaaacattccgacctcgtcgatggcacagtcatcacggaagcgaaactcgggaaagaagggatcgcgatcaagctggccgataaaatgaaggcgctcgataagctctcacagtattttgaccttttccctgattcatttaagcggaaaattgaaaatgagaagctgaagctcgccagacaaaaagccgacaaagatgcggaaacgggtcccgttgaagtggtcatcgcccgaaaaggtgatcaggcttgatcataaaagaagtcaatccgcattttgaagattatttgtttaactgggatcagacctttcaatttcttgtcggcggatacggttcgtcgaaaagctatcataccgctttaaaagtcgtattaaaactgcttcaggaaaagcggaccgctcttgtcgtaagggaagtgtttgaaacacacagggattcgacgttttctttattcgcatccattatcgatgagctgggtgtccaaaaggcggctcaggcggtttcttctccgatgcatatcaggtttgcaaacggcagccgaattatttttaaaggaatggacaacccggcgaaattgaaatccgtcaacaacatctcgctgatttggattgaagaatgttcagaggtgaagtatgaaggcttcaaggaactgatcggccggctgaggcatccttatcacaggctgtatatgatgttgacgacaaaccccgtcagccagtcaaactggacgtacagacactttttcaaggatgagcggaacaagcggttcattttggatgatgaggtcttgtataaaaagcgggtcgctgtcgtcggtgatacgtattaccaccattccacagctgatgacaacctgtttttgccgaaaagctacctcaaacagcttgatgatatgaaagcatatgatcccgacctgtaccggattgccagagaagggcggtttggggtaaacggcaccagggttctgccgcaatttgaagtgatggagcatgaggaggtcatgaggcagatctccgccatttccaacccgctgaagagaaccggaatggatttcggatttgaggaatcatacaatgccgtcgtccgggcggccgtcgatcccgacaaaaaatatctatatatctattgggagtactacaaaaataaaatgacagatgataagacggccgaagaacttcacgaattcgcggttgcgaaggagctgattaaagctgatcccgctgagccgaaaagcattcagtttttcaggcagaatggttttaacatgacagcagcacgcaagttccaaggctcgcgcctgcaatatacgaaaaaaatcaagcggtttaaaaaaatattctgttctgaccgatgtgccaatacgatctacgaattgcagccgctgacctatgcgacggatcaagacggcaatctgaaggaggatcagtttacaattgatccgcacacgctttccgcgctatggtacgcgcttgatgattatgaagtaaccgatttgaaggctgagccggaagtgagaaaacggccgaacaggaaaagggggagatagcgtatgtccactcagcaaacggtaagagcgaaagtcatgaaatcccgttttcacgggcctgtaacaaaacaaatatatgaagatcaattttcggagatctacggcgatgatattatcgctccgccgtacaatttgaaagaattgaaagccattgccgaatattcttcaattcttcagcaatgcattgacgcctataaaacgaatattgcggggttcgggctcgatgtagaatacgcttttgatttcaacggggcggatgtgacgcccgatcggaaaaaagctgctgagtccgattggacaaggcttgaagatttttgccgccaccttcattttgacgaatcggctgaaacaattttaagccatatgatagaggaccgcgaaaaaaccgggaacgggtttttggaggtgctcagaaacggtgcggggcagccggccggaattgaatatctcgatgtcaaaaatatgcgggtatgcggattgacagaaccgatcgaagttgaattcgcctacatggaaaacggatcgctaaaaaacatcaagagggagaaaaggttccgcaaatacgttcagatgattgacggcaggaaagtgtactttaaagagtacggcgatccgcgcgtcatggatatgaccaccggagagtttgacaggcagactccccctgaacgaagcgcgaatgaagcgatccattttaaaatcggcagcggcgtctacggcgttccgcgctggatcggaaatattgtcaacctgtacggggcgcggaaagcggaagagctgaattatatgtacttcagacaaggccggcacgtacctgccgtcattacggttgaaaacggcatgctctcagaggcttcctacagagagctgcaggaatatatgaacgacttggaaggcgttgaaaatgcccacaaatttttgctgatcgaagcggagggaatcgcacaggaaaaagacattcacggcagccaggacattacgccggtgaaggtggacatcaaatccctcgccgaaattttgcaggaagatgcgctgtttcttgaatatgacgagaaaacccggaataaaatccgctcttccttcaggctcccgccgctctacaccggtgatgcccatgaatataacagggcgacagccgataccgcccgcaaaatcaccgaagaacaggtttttgaaccggagcggaaaatattgatcggcaagctgaatacgctgtttctccgcgatttaaacattttccacgcgaggctccagctgaaaggaccggactttcgcgatccgcttgagatcgcaaaagtgctcggtccttttattcaggcaggagcagtatctgcaaatgatttgcgcgacctggccggcagagtgctcggcaagacgctagatgaatggccggaggaagaattcagcaggccgctcgtttaccaggaaagctcaaagcgtgcggaagcggaagcaggagcattgctgcctgaactgcaggaagccgtcgagacattgaaacagatcactgaaaggaggtgaacatttcgtgccgagagagcttaaaaatgccaaaatcaatttcgtcagttatgtcgacaaagcggcgaacaaaaagaaattcttcatgacgaagtcgagtgaaccgccgacatttcaaaaggaagtcaagctgattgcaaaagccgaggatgaaaagaagctcgtctacggcgttgtctacgagccggacattcaggatgcccacggcgactttatgacggctgaagaaatccaaaaagccgcccacggttttctgaaaaatgcccggaagatcgacaaggatcacaatttccagggaggcgtcggagaagtcgtggagtcctacgtagcgccggctgattttgaagtaaacggcgaaacgattgtgaaaggctcttgggtgctggtgacaaaagccggcgatgagatctgggaacagattaaaaaaggaagcatcaccggctacagcatggcgggcactgccgaaacggtcgagcacgcgccccaagccgactctgaaaccgatgagcccggcagtttctttcagctgtttaagcagttttttgccggcgacaaacaaaaaacgggagaggaagaaaaaaagatgaaacgatcagaagttcaaggaacgattgaagccgtcttggctccgcttctcaaacgtcttgacgatttggaaggggataaagcggcagatgaaaaagagcaacagacagaccaagacgcacatgtgaaggaaatcgtcgaggacatgctcgcccctcttattgcacgcattgaagcactcgaaaagatgagaggcgcctcaaagcaggcagcagccgaaaaagacggggaagaagaagttaaaaaatcgatttggagcggattgctttaatttggaggaggaagacaatgagaaatcaagagattattcgtaaagccgagatgtcgcttgcgactttgaaaagcggaggattaatgaatccggcgcaggcttctgcatttattcgcatggtgcaaaacacgccgacaattttcagcgaatcgcgcgtgattcaaatggaaaacgactcgcaaaaatttgaaaagatcggctttggccagcggattttacgagcggctgatgaaggtaaggcattggcgaaagatcaattaaccgcaccggtgaccagcacggtcgaactgaacgcgaaagaagtcattgccgaagtcaacatcacttatgacacgctcgaaaataacattgaaaaagacggccttcaacagacgctgatgcaaatgctggcggagcgggctgccgttgatattgaagaactgatcgtcaatggtgatgtcgcatcctcagatccataccttgcccagctcgacgggatccggaagcagtccgtctcccatatcgtcgatgcgggcggggagcaaatcagccggcagcttttcaaacaggggctgaaagctgttccggcaaaatatatgcgcgttcctcaggaattcagattcttcacatcgctcggccaggagattgaatggaaagaccgcgtcgcagaacgtcaaacgactctcggggatgcggcggtacagggcggactttctaccgcttttggcgtgcctgttaaaggggtctcaaatattcagccgtatgcatacggagaaggagatgcggccgccgaagcatcagacattattttgacgcacccgaaaaatatcattctcggtttctcgcgcaatatcagaattgaagtcgataaagacattcgcgcgcgcaaattcatcattgtcctgacggcaaaactggacagcaaattcgaggaagaagacgcggttgcaaaaatcatcaatgtaaaagagtaaatgctgagttcgaaccgttccaaaggaagaacagccgaccggcggaaaccgagcccggacaacagctaaaagctctggaaggatgtgatgaacatgctgatcacgcccgacgatatcatccaatattccgttattgaagccgtgaaaaaccggccgcaggaattgctgcgtcaggatatccttgaagctgaagcggaagccgagcagataacggggcaccgttttacagatgaaaaatatgatccgctgccggaaaaggcaaggctcgctttgctgcagctggcacagtactttgcattgaaaaacggtgatgaatcgcttttgaaaggctacaaatctgagaaattgggagactactcctatacgctttcaagaagcggaggcctagtgaagcccgacgtctataaactgctcgaagaatttattcttgattatgaatctgttcgattcaaggtgcgcccgctatgagctacaaaaggttattaagcgaccgctgcgatatctatcatttaaaggaagaccaggctgaggaagcaaggtacggcattcctgcgcgagacctgcagccgattcgcacatacggggaaacacctgatcttcaaaacgttccctgctattttacggaaaaaaaccagtcgatcgtccagcaagatcccgaacaggttatttatcattcatatttggcccattttccggcggaggcagatgtgcgccttcacgataaggcggtctggaacggtgtcgcctacacgctgcagcagccgcgcaacatcaaaggccatcacctcgaagtgttagcggtcagggatgaaaaactatgaaaatcaaaggattgaaacagctgtcgcagacgctggaaaaagcagggcagagcggctttcgaaatgaagctgccaagtggcttgaacaggcgggaaccgattttttggacctggtctgtgacgaaatcgtgcgcgccggatcgattgataccggcagccttttgcgctctttcaagcggggagccgaagggaacaggtgggaaatcgaaaaaggcggactcacgcttgaagtcgggacggagttagagtacgcctcatttgtaaatgacggccattggacaggcggaaaagacgaagtcaggtgggttccgggacaatggcacggcggccggtttcaatatgatcccggttcatcgtccggcatggccttaaaacggcaatgggtaaagggaacaggctattgggagcatgcgctttacatatttgagcgtttatttgaaaaacgcctgaatgaaaggctgcaaaaatggctgaattccctttaaggaggtgaagctttgaacgacgaaacgggatctgtcatgaatttcttttatcaagtctttcctgtcgtctgttatgaaaaggaaatacccgaccactttcaaataccgtcgctgtattttcctcccccttctgtttttgatgagaatgatacggtttcaacatttaaaaaagtcttcaccctgaatgtgaaactgtttcaccacgattcgcagcaggcccatgatcatgccgagcgcattgcagacgccgtaagggaagcgaggcacatcataccgctcattgaccgatcgggtaaaggcacaggggacagcttgaggatcagccggatcgagacgagaataggggattccggcaccgcgtccattattattcaatggaacagccgctactggtacaaacgggaaagcgaactttctctggaaacaattgattttacaaacggggtgaaataattggcagtcagcaaaaaaacaaacaccgaagcaaaaaaggcgcctcaagaggaacgtgaagcgctgttctacatcgaagacctgagggagcacgcgaaagagcttttcggcattaagccggaagttctcgatggtgctctttttcatgtgaaagaagagcagatttcaaaacctgaggcaagtcagcttattcaaacatttttagccaaggaggtcatgaattaatgaacggcggaacatttacaccaggcaaagaaaaagatcgtgccggcatttattttaattttaaaacgacagcagaggaacgcgtttccatcagggatcgcggtacagttgccctccctgtcgtcatgagctggggggagccgaaaacattcgtatcgatttccagcattgaagacttaaataaaaaagtagggttgaacatcgatgatccgtctcttctgcttttccgggaagcgaagaaaaacgcacagaccgttttgctgtaccgtctgaacacaggagcgccggcgaaagcccaaatcggcgaaacgctgagcgtaacggcaaaatacggaggcgagaaagggaacgacatttcgatccgcatttccgaaaatgtgctcgattctaaaaagtttgatgtcaccacctttgtcggaacagatgaagctgaccgacaaaccgtcaaaacggcagaagagcttaccgcaaatgcgtacgtcgcgtttcaaggggaaggcgcgcttgaactgacagcgggcacaaagctgtcaggcggggagaacggaacggcaagcgttgccgattacaccgcatttttagatgctgccgaaacggaatacttcaatacgatcgcactcccggtcgcagacaatgaacagctgaaagccacttttgccgctttcatcaaacgccttcgcgacaagcagggccagaaagtccaaggcgttgtcgccgattatgccggagactatgaaggcattattaatgtaacgggaggcgtcgtgctggaagacggcactgaaatcactcctgaaaaagcgacggcatgggttgccggagcgagcgcaggcgcgacttttaaccagtcgctgacatttgtcgaatacgaaggtgctgttgatgtcctgaaccgtctggatgaagaccaggtcatcgaacgtctgaaaaaaggcgagtttttatttacatttgatgcacgcgatcaatcggtcagcgttgaaaaagacatcaactctttaacgagtttcactgccgacaagaacaaaaaattctcgaaaaacaaaatcatccgcgttctcgacggagtcaacaatgacctgacccgcgagttaaaggctttaatcaaagcacgaaaagcaagcggcagcgacatccctgcatcagacgatggtttgcaatacgtcaaaacgctgatcattcagtatatgacggcgcttcaggaagccggcggcattaccggctttgattctgaaagcgatattgccattacactgaatgaagaccgcgacgggtttttaatcgatttagccgttcagccggttgatgcagcagaaaaattctactttaatgtggaggtaaaatagtatggcattaaaagcgcaaaacacgatttccggaaaagaaggccgtctttttctcgacggacaagagatggctcacatcaaaacatttgaggccaatgtcgaaaagaataaagctgaagtcaatattatgggccgccgcatgaccggccacaagacaacaggggcaaacggcacgggaacggcgacattttataaagtcacgtctcaatttgtcacgttaatgatgaactatgtgaaaaaaggcgatgatccgtatttcacgctccaggccgtccttgacgaccagtcatcaggccgcggaacggagcgggtcacgctgtatgacgtgaattttgactcggccaaaatcgccggtcttgacgtcgactcagaggcgctcgaagaagaagtgccgttcacatttgaagatttcgacgttcctgaaaaactgaaagatacgttttaaaataggagccgtatacaacgagcccgcttttcaaaaatagaccgcaacagccggtctatttcttcttttttacggaaggaaccgattcagtagtcaggaaataggaagcaaagcactctcgccaagccgagggtgctttttcattgcaaatccaaaattgaatgttaaaggagcaagcagacatgagcgaaaaacaagaagaaaaagtatatgatttatccttttttatgccgggacaaaccgttgaagccgaagaaatcaaagtgccgatctcaaagcggttcgtcgataaaaagggcaatgtcattccgtttgtgtttaagccgattacaaccgagcgcattgacgagcttgaaaaagaaaatacgacttataaaaacattaaaggcagaggccgtgtcaaggatctagacacccagcgcttttacgccagaatcgccattgaatcgacgatctaccctgacttccgttcaaaggaattaagagaagcctataaaacggccgacccggtcgaagtggccaaacgcgttctctccgtcggtggggaatatgcgaactggctcaacaaagcgattgaaatcaacggctttgaagacgatcttgaagatctggaagaagaagcaaaaaactaattaaggatgggaataaagaagcggtgtatctctatttcgcgatgcacgaacttcactattctccatcccagctccgggagctgtacgaagccccaaaaccgtttaaggcattattatacggactcatcagctacaaacttcaactcttggaaaaagaagcgcggaaaggaggtacataatccatggcaaaactgacggcacgttttgaacttgaagaccgggtgtctaagaagctgcggaggattcagaagggttttgcgattttagaaaagagagcagaacgattgaaccggcaaatcaaaattaacattaaaacggaagatcaagctttttttcggcttaaaaaactgaacaattacctgatgagaaagttcattcactccgtaaatattggagtgaatataaatgaccaggcatccgctcaactaatagaaatacaaagaagattaaaaagaattccgccagaaacaaccgttaagttaactttagcagacaatgtctcgcaaaagttaactaaaattaaaaggatgctctctaagcgtgaatatttcttatcaatctctgctgaagaccgtgtaacattaactgttaaaaaaataatcggctatcttaaaaacaatttgaaaaaaggttattcagttcagttatatgtacttgataaagtaacgaaaacagcaagcagaattgcctcgctcctaaaaaaactagagaaaacgtacattgtcacaattgatttaaacgacaaggcgaccaacaaaatcaaaaacaaaaaagtttcaggagaaacatcagaagtcaaacacgataaaaagggatctttctttgaacaaggaaaagacttgttaggcgaatggtggaaaaagtcaggatggccttggataaaggatactgggaaggaaattggcaaagcatttgtagatcgatttaaagatagactgatggaaaaattgaacaatgatatttttgacaaagtcattgataaaatcttagggcctcagtcaacaaaaggttctcagtcaaaatcaagcggaccaggccatggacaatgctgctgctgtttatatccgcagaaagatcctccgaattcagccggaaataggcaaaatgtctctgtttcaggttcaagtgaagagcataaaggctggaatctaaaaagcttatcaaggggaattcttccagccgcaaagatactcttctatttaaaaagtttaaggcccaacaaagagcccggtaaacttgcaaaattattagagcccttaaaaccaatgattgaaaaattaaagccgctaggtaaaaaactaagtccgctaggcaaacttttgccgcttacagatctaatcggcatcaacaaagataacgcaggcgaaaaaattggttctgtaggcggccgtatgttaggaacttttggtggagaagctgccggaatggcgatcggaggattggttggaggacctccgggtgcaatgattggaggagtagtgggcggctttgcaggcgggatgggcggtgaaaaggcaggcggttccctcggtaaaatgtttgacacttcccaattgaaggaagatctcatgaacacgctgtttaatggagactggtggagcgaacagtgggattcccttagtcaaaccgctacaaatacatttttaaatggagactggtggggagaaaaatggggatctcttaaagaaacagccacaaatacgtttttaaacggaaactggtgggctgaacaagccggctatctttatggtactttggaagctgcatttttagggccgttaagtaatgtttggggaaccattgcaggaacgatcagcgagacgatttttaacggagactggtggagcgaaaaatggaacaatgcagtaacatgggcgcagaatacgtgggacggagctgtctctgtttgggaatccattacaggaaccattaaagacaccgtttttaatggagactggtggagcgaaaaatggaacaatgcagtaacatgggcgcagaatacgtgggacggagccgtctctgtttgggaatccattacaggaaccattaaagacaccgtttttaatggagactggtggggtgaacaatgggacaacgcagtgacatgggcgcagaatgcgtgggacggagccgtctctgtttgggaatccattacaggaaccattaaagacactgttttcaatggagactggtggtctaaccaatggaatagcgctttggaaaggggcaagagtattttcgaaggcgcgaaaagctgggtcggagaaaaagttgaatattttcagaaaggtcgggaaagagcccataaggatcatggatttgaaggctatgccacaggcggctacatcacaaaaccgaccatctcctggatcggtgaagccggaaatgaattcgtcatccctacggaaaacaaccggggacgcgggaagatgctgcttgcccaggccgctaccaagctcggcatgcgcgttgttgacgacatgggggccgcggcgggagacgggggagcttcttctccggtttcaagcaccgcttcgtattcggcttctgtgtcgcctgctgtcggtgtcgggagtatagcagcagaggcgcaggctttcggccgggaattcaccggcggttttgacaaggggatcggctcaaacgctccttcccttgatcaatggaagcaaaaaaacatcagcaagccgtttagcagcctgccggcagaatcgtctaactacggaaaacagacggttgccgggttcgcttccggacaaaatgcttccgcgaccggaaccggcggttttcttcaagcaaaagtaaatgcgccttatcaaacaacggtgaaaacgtcctcttcctggggtgcaaatacagtcaaaaactttgcaaccgggcaaaatgcaacaccgaccgggacgtcgcagtatgttgataaaaatatcaacaagccgttccttgattcgaaacagtcggctgcaggctgggggtcaggaatggtcggacactttatcagcggcatgaatggaaaaggcagcgaagtttctcaagctgcaaaaaacttggcgaaaaaagttgaaaaagcgttccgcgaagaactagatattcattctccgtcccgggttatgatgagtctcgggcgtttcgcgtcggtcgggattgtcaaaggtttaagctctgtcgatgtcaaaagttttgcggaaaaacaagcaggctcactggcagctgcgttttccggaatcggagccgtcggcggaaatgtaaagtcgtggctgatgcaggcgatcatggctaccggttcgccggtgtcgtggcttcagccgctttctgttattgctcaaaaggaatccggcggaaatccgcgcgcctataacggctgggacattaacgccaagcggggggacccgagcagaggcttgatgcagacgatcggccaaacgtttaatgcttacaaaggaaaaggaatgaatgatattttcaatcctgttcacaacgcggtagcggccatcaactacatcaaatcgcgatacgggtcgccatttaacactccggggattaaaagcatggcaagaggcggagcttataaaggctatgccaacggcggcctgattacgagcgagcagatcgcccgcgtgggtgaaggcggcaaacgcgaatggatcattcccgaagaacgcggcatccgcggcagatatctgcttcagcgggctgcaggcgcgctcgggatggaagtgcaagaccccgctgaagggtccggttccatatcaagtgctcaggcggctgcagccaccacgggcgggacccgatcccggcagcctgctgaaaatggcgccaaagaagtcaacatctatattaccggggacaatcattaccacagtgagcgcgaccaggaaacattgattgcgaaaatcaagcgcgctcttgtcgatgagcttgaacgggatattcatattgggacgaaaggaagcgtagcttatgactaaatccgtgtacgaattttggctgacgcaaggaaaggaaaagctgcgcctccctgtgcttccagagcagcttgacgtcagcaataatcttgcgaacgaatctgtaaaggtgtcaaagttcggcgaggtgacgtttatcaatgaaccgggagcgaagacgatttcattttcgtctcattttccgaaaaagtattctccgctctcggaatacaaagggtttctttcgccggagaacgcgattcttaaaatcgagaaatggatgaaagcaaaaaaaccggttcaatttctcgtgacgggaacgaagatcaatttcacatgcagcattgaaaacttttcgcatcgcgagggtgaaaaggatatcggcgaccgggattttgatctcacattgaaagagtaccaaacagcatcaccccggaagattaaacaaaaaaagaaaacgaagaaaaaacggccgtccaaaccggctccaaaaatgtacaccgtcaaaaaaggcgatacgctctggcacatcgcaggccgtttttacggaaacagccaggaatggcggaaaatttggaatgcgaacaagcaggcgatgatcaaacgaagcaagcgaaacatcaaacagccgggacattggatttttccggggcaaaagctgaaaataccataaaacgaagcgccggatgaaccggcgtttttctggtaaatcaaaagcaggggatagcgatgatcgaattatttgtcataaaagaaagcgaatggtatgaacttgtcaccgaaagcgtcacattggaaggagaaaggtaccaggcgcctcgttcgatcgaagcgtcgattgtgatcaagcagggaagccacaaatattacagcgtgcaggaaggcgataccgttttatttaaatggaaaggaaaagaactgtttcgcggaattgtgttcagcagggtgccgaaagaatatacgcttacgtttaaagcgtacgacatgcttcagtacttggtgaaaaaccaggatgtctatgtattctcgaacaaaacggccgctgacattgtcaaacgaattgcgaacgactttcaaattcccaaaggttcgattgcaaacaccggacatacgattaaatcgctcgtctttaaagacaatacgagcctgtatgacattattttaaaagcgctgcgggagacaaaaaagcaaaccggaaaaaactatcagctgtatgccgaaaaaggaaagctgtgtttacgagcgtggcccgaaccggaggatatctgggttttggaaacgggtgtgaacattacggattacgcttacagcacgtcaatcgatgaaacggcaacccgggtgaaactgagaaagcagaaagataacaaaacctataccgcatccgcaagcgatgaagccggtatgaaaagattcggcgttctccagtacacagaaacggtttcggatgacattaacgaggcgcagctccgcgaccgggcgaagaagatacaggctgaaaagaaaggcgtcaaaaaagagctgaaaagcatacaggcaatcggcataccggaagttcaaagcggactgccggtttatatatcgattccggaagcgggcattaaagaaacctattgggttgataaggataaacacgattttacaggaacaaaacatgtgatgacgattgatgtcgtcgctaaaaacaccatacctgaaggagcgtcttcatgaaattaagcgatgcgataaaagagctggctcttggagccgtaaacgctgaatcgcctgtcgatgtcatgccggctgaagtcgtgtccgcgtctccgctcaagctgaagctccgcaatcatgataaattggtgatcccctccgacttattggtggtggccaggcatttgacagagcatacggaacagatccgaattgacggagaagacaaaacgattcgcttttacaatcaattgcatgccggcgaccacgtgatgattgcggctatgcctggagggcagtctttttttgtaatagacagagtgtaggagtaggaggtggctcggatggctctttcgccggaagtatcttttgaagatatcgaggatgacagcgatgtgattgagacttcaaaaacgtacaaaattgattttgaaacaggcaggatgacgggtgatatgatttcggggctggaagccgtggaacaaatggtttgtatggcgctgagaaccgagcgctacgcatacgccgtttacagccataatatcggaaatgaactgcaggaggttctttcagatcatgaaacgaccgacgcttataaagaaatggagataccgagattgatcgaggaagccctcatatacgatgaccgaatttcggcggtgaccgacttcgagattgagcgtcaaggcgatgccttccacgtgtccttttcggttgaaaccgatgaagggacattggaaatcgaggaggtgattggggaagatgtttgaagaccagacatttgaagagatcatggaacgcatgcttgagcgggtttcagatgagattgacaaacgtgaaaacagcgtcatttggaatgcgcttgccccggcagccgccgagctggcgctttcttatatttggcttgatcaagtgctgaatttggtttatgcggatacggctgaaggcgaatatttggacagaagggcggctgaggccggtcttgagcgctatcgggcgtcaaaagccatatggtctgcggcatttacggatggagtatcggttccccccggaacccgtttctttctggaagatttatattttaccatgctcgaagacggcaagctggaatgtgaaacagccgggacaaaaggaaacgccaatttttcggggcggcctttgcttccgctcgataccattcccgggcttgaaaaagcggttatgggaagccttgaaattcccggccgcgacgaggagacggatgaatccctgtatgaaaggtatttaatccgcgtccgtagggaagcggtcagcgcgaatcagctgcattacaaacaatgggccgaagaagtggacggcgtaggcaaagcgaaggtctttccgctgtggaatggcgagggaaccgtaaaggttgtcattacaaacgcgaaaatggagccagccacagacgcattaatcgaaagagtcaagcagtatatcgatcccgatccgggcaaaggggaaggtatggcgccgatcggagcttataccgcggttgaaagcgcggtatggaaagacgtgagcatatctgcaaaaatcatacctgaatcaggccggacgatcggtgaggccaaacaggaaattgcagaaaaaatcactgaattatttaaagaaatggcttttaaagaaagcgtcatccgtctctcgcagatcaacaacatgatctatcaatcgtcctctgtcagcgactattcggaagtcttcatcaacggggaagcgaaaaatctgcagttgacagaaacggaaattccaaagctggggcaggtgaccatcattgagcaagattgatgaaatggcttttcacctgccgccatacttgatggaaatccgggaaattcaagaaattataacggctgaagcgcctgaatttgagaggcaaaatcaagagattttcgatatgacggaccagcttttcgtcacgacggccacatgggggctggacaggtgggaaaagattttgaatgtcagacgcgaggcttcggacggcgtcgatattcgaagggcccgtctgttaaccaagatgtccaatattccgccgattacaagccgctcgatcgagcgcgcggttaatgcttttttaaaacagccgtccgcatccgtcagactgacggccggacggtatcattttttgctgagtgtaaacggagaggatctgcagtttataccttcaatcattcaaaccgtcaatcatatgaagcccgcccatttggcttatacattccggggcgggtttcattatgaatgtcggccgccgaaaagcgttcatgacaggctcgttttaagaagcaaaaacggctttttcggtacgataccggtctatttggacggacagtatctgcttgatgatgcattctacttgaacggttttcgagaaatcgacggactgccccgcaggtttaaacagcagctcacactgcgccacaagaagcggcaatacattcggtccgcctccagctttacgataaagacggccgctgaaaaccggcggaaacagcaaacaaaagctggcatgaaaaccggcattaccaatcaaaacaaaaaggtccaatccttcaaaatcagctgcaaatgcgaacatgaatttaagcaagcaggcgcgcttgaaatgagagagaagtggtggacgctaaacggcgcatttttgctcgacggtacaaagcagctggcagcagcggcgcaaaaaatcgcattgtaaaggagaaatcaaaatggcacaacaattaacagtgacaacgctttatgcgagacagcaaatggcaaaagcacgggctgagggcggcaagctcaccaaaatcacaaaaatggctttcggaaacggaggtacaaacgataaaggcgaacccgttcctctgcagggcaacgaacaggccctgaaaaacgaacttctgcaaaaggatatcgacggctttgcctttatggagccggcgaaagtccgctatacatgtacattgggagaaagcgaactcgcaggggaaacgatcaacgagctcgcccttgtcgatgaagccggaaaattcacagcggtcagaacgatgacagacaagcagaaagacggcgacatcgagttcgtctttgaaatcgacgacatttattaaaggagctgaaacaaggtggacatccaaaaaccgagacgctttgaaacaacagaccgcgcccatgccgacttgttcaacgaagcgatagatcagctgaatgtaaacgatgaacggattgcaaagcgggctgaggaagctgaagaaagggctaaaacgtatactgatgcccatgctaacgaccattcgattcacatcaccgacaaagagagggaaaaatggagcgcggggcagttatataaaataaccgaaaataacggaaaagtcttttacagaggcagttcagaaacaacagattttaacactttgacagaaaccggcatgtatctcatctataatgaaggaatcaactcgccaccttcatcaaatcggatatttttgcttgtcatgagtttcggcaataccttggttcaggcagcttatgaatcgtacaaagggacacagtcgtattttagattcagaaaatccgattcaacaacgtggacgccatggcagacccaggaaacgaccagtggagcacaggccaaggttgatgctcatgaacaaaatacgaatctccatgtgaatgaagatgaacgggaaaaatggaacaatgcacagttatataaaattactgataataatggaacgcgcacaaaactgccggatggaacggatttattaacgctgccgacaggtttttattatgctatgggccatgttgttcaaaacaaccctgtagaaaacgacagctcctggtttaattacgatgtaattgaaactggcgctggaagaaagaccatccatgcgtggcggagctatgataatactttatggcatggaacagttcacacagatggacagtttcgagaatggaaaagagtagtcacaaacgccgatttaaacgttgcttggcagactccaacgttgacaaatggatggaaacagtatgggtcgcacaaagtccggttttgtaaaaatatgcttggagaagtcgaaattattggatcaataacgggcgggacgattggctttgatattcctgcgtttacgctgcctgaggggttccgcccgattcaaatgatgcactttgtcggggtcgcatcaagtgtaggtacagggtcaacaccgcaatatcaccggacactgatcgatactgacggaagggtatgcattcaatcctgttcgaatactgtaaatccaactgagtttattacatttggttttaaatttaggactgcatagttatgcagtcctaaatagatcaaggaggcatattacagtggacattaaaaaaacaagacgctttgaaacaacagatcgcgcccatgccgacctttttaatattgttatagatcaactgaatgaaaatgatgaattgcttgttaagcgtgctgaagaggtcgatcaaaaggctaaaatatacacagatgaacatgcttcaagaaaagataaccctcatagagtgacaaaagaacaacttggtttggatcaagtagacaatattaagcaggcgtcaaaaatagaatttgattcacatctaaatgataatctgcgtcatattataagccaagaacgtgataaatggaataatgcccaactttttaaaataacatctgatacaggtatccataaatataatcttacttcgggtaccttttatgaagctttaaaagatgtgggaactggaactttttatggaacgaatgcagtggaagattcaccgtcaaatggaagtctccgcggaatgcagttggttggccaaaaagggataggtatagggtatgctattgatacactaggcaatgcatggtggttttattacaatgcagctcataccggaattaaatggtttcccattgaatctactgtcaacgcccaattgaaggcagataaaatgttaaatgatgcgaaaaactatactaaactaataatcttgagttaaagttaaccgatctaacctggctaactccaacgtttcaaaatggctggggaaattatcctgctggaagtgaggatgataaaaagaaatatgctgtccgctacgccaaagatattaccggaacagtatatgttgaaggtgcaatttccgggggaagtatcgggtttggtataccagcatttactctccctgaaggctacaggccaggaagaaattttcaatggacgggtgtggcgtcccaagtgggaatgcagggagtaccgcaatatcacaggctatttgttaacacggatggagaagtgatcattgaaaattgttcaaataaggtctatccaaacgaatatatagctttagggtttagttttaaagctaggtgattggtcacaaatggataatatcctgatatatacttattgaactggtctatagagaacggtttttatttttgcccgtgtagatgaattagggggaacatagatatgcaacaaacgtctgaattagaagtttttcaaaaggaaattacagagatgaaagctgatcaaaaatcactcgaacagcgcgtcagtacactcgaaagaacatcagaccgccacgatcagcaaatcatctcgattaacgaaaagctgaacaaaatcgaagagaatacaacctggattaagcgcagcatcacaggcgcgataattacagcggtcagcaccggcatcatcggcggcgcgatcgctgttttttataatttattgcagaaataagggaggacatcatcatgaaacatatcgacaaaggcacggtcgtcaggacggtgcttctttttattgcgctggtcaatcagacgttgatcatgtttggaaagccggttttgccggtcgctgaagatcagattcatacattggcggatgccctgtattcggccggatctgcggcttttacgatcgctgcatcgctcgttgcctggtataagaacaactatgtgacgagcaaagggaaaatgcaaaaagaagttttacagaaaaaaggtttaacgaaataaagcttcctttcagactttccagaattgaatttgaaaaggaatgatgaagtttggtcaaagtaatcaataactttgtaaaagtcaatcaatacacccgtcccgggctgaagcttgcggcagtcaaaggcatcgtcatgcattggacggcgacgcccggggcttcggctttgaatgagcgcaattatttcaatggcacctgcattgccgacaagcgttatgcgtcggctcactattttgtcgaccgccatgaggcgcagcatattattcccgatcatgaagtcgcatatcatgcgcatgatcaaaaccgctgctatgtcagctttctgaagccgaatgccaataccacggctctcggggtcgaaatgtgcgtggaaaaagacggtaccatccatgaagagacgattcgcaatgcggcagagcttgtagcggatttgtgcaagacatacggtttgtccgcagatcggattgtccgccattacgatgtcaccaacaaaagctgtccaaccccgtgggtgagagatgccggccaattgtcagctttccgtaaaagagtagacgcccttttgggaacgaaaaccgtatccgtgtcggctgcctccaccagccagacaagttcgtcatctggcatcatactcaaaaaaggaatgtcaggcgctcatgtgaaaaagctgcaaactcgcttgatcgcggccggcttttcgctgcctaagtacggggcggacggaagctatggagacgagacggtgcaggcggttgtttctttacaaaagaaagcgggaattaaagccgacggcatttacggtccgtcaactgaaaaagccctctcggccgctgaagcgtcagcagccggcaagagcaagacgtggacccttcccgacggcatttataaggtgaaaaacccgctgatgaagggaacgggtgtcacacaaatccagacagcccttgccgctctttattactaccctgataaaggggccaaaaacaacgggatcgacggattttacggaatgaagacggcaaatgcggtgaaacgttttcagctgatgtacggtttgggagcggacgggatatacggaccgaagacaaaagcgaaaatgttgtcccttttgaaataaaggaacttttaaagttcctttatattttttaaaaattttcaaaaaataactatcccacagccatacttgtatggtagtatggcggagagggggtgagagtcatgaaaatgaaacaattaaacccgcgttctgtcagagatcaaatctatcaggtgctgaaggaagaaatcatgaagtttcggcttgttccgggtgagcagatatcggaaaaagagatttcagaacggtatgaagtcagccgcactccggtcagagaggcttttttgcaactgtcgaaggaagggcttctcgaagtctatccgcagaaaggaacccgcgtgtcgctgatcgatcttgacctggtggaggaagcgaggtttatgcgggaaaaactggaaaaggctgtagctgaactggcgtgtgaggacttcccgcaggaagctatgtttaagctggagcagaatgtgaagatgcaggaattatcgatcgcacagaaaaattatgaaagtttgtttgaattagatgaagcgtttcatcagacgatttttgaaggctgcggaaaagcgaatgtctgggctgcgattcagcagatgaacgttcccttccaaagaatccgctttttaaggcttgccgccgattttaactggaacaccatccatcagcagcacgcggcattaacagaagcgattcgaacaaaacagaaggcaaaagccaaggaaatcgccgaagagcatttgcagctagtcatcgtcgataaacagatgctcattgatgagtttcccggttatttcaaaaagtaagcgctttaaaaggagtggtgatgtgaaagctgcggtgatgacgaagccttattcgattgaatttcacgacataccgcgtcccgaaccggccagcggtgaagtccttgtcaagataaaggctgccgggatttgcggaagtgatgtgcatttttacgacggctcaaatccatatgcacagtaccctcagatctttggacatgagcttgcaggcatcattgaaaaaacgggggccggcgtgagggggcgatccgcaggcgaacgggtcgtaattgaaccggcgatcccgtgcggaggctgctacccttgtcggaaagggaggacaaacgcctgtatgaacatcgatatgatcgggtcggttcgcagaggagggttcgctgattttatcattgttccagaaacgcatgtccatccgattcctgagcaaatggattttgcaaccgctgctttgtgcgagccgttttcaatcggagcgcaggcggttcggcgggcagatattcaaacaggcgaaacgattgtcatattgggaatgggtccgatcgggttaacgattttggcgcaggtaaaaaagcgcttcgacgttcgtgtgatcgctgtcgatcctgtaagggaaaggcttgagcttgccgaggcattcggggcggatgccgttattcagcctggtgaagaggatgcagagcaaatgattctgaagctgacaggcggagaaggagcggggattgtgttcgaagcggccgggattcccgcgacgattgagcaatccgttcgtttggcggccgccgccgggcgcattgtcattgtcggcttaacggggaggaatgtgacgattccgggtcttcttctcacaaagaaagatattgaaatttatggaacaaaacacagcgtcaatcaatttcccggcgtcattcaatttttgaatgaaaaccctgaaatagcccgggcttttgtcactgagatcatgccttttatggaaatagaagaggcgttgaaaaaagcgaaaaactgtccccatcaggtcacaaagatcattttatcttattgaatcggtgaggaggaagtgtgatgaaaatggttttcagatggtatggagaaggaaacgactccgtcacccttgagcagatcaggcagattcccggtgtggagggaatcgtttgggcgcttcatcatcagccgccgggtgaagagtggccattggaagaaattttagaagtgaagcggcagtgtgaacagcacggttttcacattgaagttgttgaaagcgttaacatccatgaggatataaagcttgggctgccgacgagagatctgtatattgaaaaatacaagcgaacgattgaaaatttggccaaagccggcgtaaaagtgatctgctataattttatgcctgtatttgactggctgcggaccgatttgtacaaaaaggctccagacggttccaccgctttgttctatgagcacgcaaaggtgcacacaatcgacccttttgcgcttgtcgatcaaatcgccaagcatcccgaattcacgatgcccggctgggaaccggagcggcttgagcatctgacaaggctgtttgaagcctatcaaaatgtgacggaggaggatctgtggagccatcttcactattttcttgaacgcatcattccaaccgccgcacgctgcggaatcaaaatggcgatccatcccgatgatccgccgtggccggttttcggactcccgcgcatcatgacttcaggagaaagcatcgggcggctgctacagcttgtcgatcatccggcgaatggcgtgacactgtgcagcggttcattgggcgccaaccccgaaaatgatatttccgccatgatccatgcgtatgccgaccggattccatttgcccatatccgaaacgtcaaagtctacgaaaacggcgattttatcgaaacatcgcacagaacaaaagatggcacagttgacatttgcgggattgtcaaagcctatcatgaaacaggtttttcaggctatgtgcgtccggatcacggccgccacatttgggatgaaaagtgcaggcccggctacggtctgtatgacagggcgctcggtatcatgtatttatggggcatatgggattcgctcaatagagaaaaacaggaggcttcaaaatgcttgaaatccatgaaaatttagcggggaaaactgcggtcatcacaggcggcagcggggtgctttgcggtgcgatggcgagagagctcggccggcagggtatgaatgttgccattcttaatcgaaccgttgaaaaaggggaactcgtggccgaagctgtccgaaaagccggcggcgcagcgattgcagttgagtgtgatgtcatcagccaacggagcgttgaacaggcgaaacgcgttgtggccgaccgattcggcggctgtgatctattggtgaacggagccggcggcaatcaccccaatggcacgacatcagatgaaacattcaactccgagcacatcttccaggacaacatcaagacgttacttgatctgaactgcgatgatgtcggttctgttctcaatttaaacttcctcggttctttcattccaacacagcaatttgcaaaaatgatgctgaatcaaaaaggggcgtccgtgatcaatatttcttcaatgagcgctcaaaccccgatgacgaaagtgcctgcatacagcgcggcgaaagcgggcatcgacaattttacgaaatggctggccgtctatctggccgaaacgggaatcagggtcaacgccattgccccgggatttttcctaaccaatcaaaatgaaaggcttcttcttgatcaaaacggcgaatttacagatagagcaaagaagatcatctctcacaccccgatgaggcgtttcggcaaaccggaagatttgctggggacgctgctttggctggcggatgagaagatgtccggatttgttaccggcataacagtgccggtagatggcggatttacggcttatgccggtgtctaaaaacacgataaaggggaggccggtacatgaagcagattgtgtgtgaaaagccttatcgttttaaaatgacggatgtgaaaatgccggaactaaaggatggggaagcattggtccgcatcaaacggatcggaatatgcgggacggattttcacgcttattgcggaagacagccatttttctcttatccaagagtgctcggacacgaactgtccggtgaaattgtcagcatcgataattccggcggaacgctcaagccgggcgatcaagtgtcaattattccttatttggaatgcggggcatgcatcgcctgccggaacggacgccccaactgctgcgtcaatctgaacgtcctcggtgtccatacagacgggggaatgcgggaatacataaacgtcccggcagaccacctgctaaaaacagaaggattgacgctcagcgaagctgctgttgttgaatgtttaagcatcggcgcccacgctgcagaaagggcaaatatcaaaaaaggggaaacggtgcttgttgttggagcggggcccatcgggctcagcgtgatgaaattcgcaaaattgaagggtgcaaaagtcatcgcgatggatgtcagaaaagagcgcctcacatttagccgcagatgggctgaagccgatgaagtcgtattagggggagaacatgcggctgatgagatcaaacggttgacgaacggcgactttccgacggctgtctttgatgcgacagggcaccctgcatcgatgaacagcgcttatcagtacgccgcacacgggggacggctgatctatgtcggacttgtcaacgaccatctggctatgcccgatcctgaaatccacatgcgggagctgacgattttatccagccgcaacgcattaagaagagattttgagacggtgatgaaagccatcatggatggcggagcggatgcgaaccggtttgtgaacggacagatggcgtttcacgatgttgttgacggatttcaatcagcgcttgctccggaaaccaatcctgtgaaagtgttgatccatctgtaagatcgcacgaaatgaaagcgttttctaaatttcggaaagaggggggttggccatgttttcaaacggccgcgggtttgtcatcgtgatgctttttttggcgggagtgattaattatttggatcgttcggcattgtctgtcgccgctccttttattcaggaagatttgaacatacgtccggcgcagatgggcatgctgttcagcagttttttcatcggatatgccgtctttaattttatcggcggctgggcatcagacaaatacggagcgaaacatacgctgtcggctgcaatggtcgtatggtcggttttcagcggcgctattgcactgacatataatttcgtttcactgtttatcatccgcgtcattttcggcatgggggaaggtccgctgtcagcggcaacgagcaagtcggtcaacaattggtttccgcaaaaagaaagggcaagagcgctcggcatgacaatgtgcggaacgccgctcggcggagccgtttcaggtccgatcgtcggattgatcgcgatccattgggggtggaaggcttcctttgtgttgatcatgatcatcgggcttgtttggacttgcttctggatgaaattcatgaaagataagccggctgattccggcagtttgtctcctgaaaaggaagcgcgtccgaaaaaggataccggcatcccgctgtctttttatttgaagcagccgaccgtgctgtttacggcgttcgcgttcttttcctacaactatattttgttctttttcttaacatggtttccgagctatttaacgacagcccgggggctgagcattcacgatatgagcgttgcaacgattataccgtgggttgtcggatttctcggtcttgcgcttgggggatttatttcagattatctgttcaagctgacgggcaaacagatgttttccagaaaagccgtgcttgtgtgctgccttttggctgcagcggtatgcattggatttgccgggcttgtcactaccgcgtttggagctgttgcacttgtcgcattatcggttttctttttgtatttgaccggcatcacatactgggcgattatacaggatatcgttcatccggacagggtcgggggcgtgagcggattcatgcattttcttgccaatacatccggcattatcggtccgacggttacagggtacatcgtcgagtacaccggagctttcacaagcgcctttttgcttgcgggagggctggcggtggcaggttctatttgcgtcgctttgtttgtgaaaccgatacgttctgaaaggctgcctcaatctgtaggagaaggcggacaggggcatcctttatgatgctcctgtagacatgaaaataacccccttctcagcagagaaggagggtgaaagtccaagcttcacggtttgttttttcttctgttcagcgttttaatgattttttcgcttcttcttctgagaagagaggtatagtctgacaggccgaattttgcgaaatcgacgtgtttgacttgttttttcagttttttcacagcatcacctaattcagcggtttagttgattggtttattgtatgtaagaaacgggaaaacggaataaggacgggagaatttttttcccgtcctcgttaagctttttttcttttatactcgccgatcagccgttcgttttgccggaaaatccgttcggtatgggggctgacttcgtatttcgcgatattggttttggattgccttttaaacattttaaaggcgaggcgcttttttacgctttcctggtcttgctgaaaagcaggctccatcagtcgtcaccttcctcttcgtttggtagcagaagatcatagatgcttgttaaagaagtaaacaggagataatcaaattctgtgacaaggtcttctgaggttaacttcatgacatagtcaaaatcgtggatggaaaaaggaatgaggaccatttttccgttttcttcataataaacgtctttgcggtcaagcttttcttgaacatcgaaccggttttccatatgctcaagcaaatgatccttgctttcttctgaattatattcgcaaagtgcagcggatatattcattttttcggcaaaccgtttgatgagcttttcgatgccttctgcatacgcttctatatttccataatagatgtggatcggttcgtttttcaataggtattgaaacgttttcagcctgttttgatacgtgtggaggaggtcgttgttttcttcgagaagcattcttgtatctgtcgcgagttcagagctgccgagctttttaaagtaggcatttaagaaaataaaagcgtctgtcaacgtgaaaaaaacggcaacgatcaggtaatgaagcgggtttgtgaaaattgactgcggatcgtgcgtccaatatatcacggcgccgatgacataaagaaggtaccacgtttttctgatggcgaccgttttttcggcgagctgtttttcaaaacgccacacggcagctacgtacagagccagcgccaaaacaataagccaaacaaggaattgataaaatagcagcataacttgtttccctcttcccgagaaatagtgcagttcctatttctattgttatgccggctttcttttaaacatgaaaactcccgtcctagattcggacgggagtgtgctgattaaaagaataaatcaagtatgaaataggcaaatgcaccgatggttgccgaaatgggaagggtaatgacccaagtgatcagcatccgctttgcggtgccccagtttacgcctttcacccggtgggaagcgcccacgcctaaaatggatgaagaaatgacgtgtgtcgtgctgacaggcaaatggacgatcgtcgcgccaaagatgatgagggctcccgtcaaatctgcagagacaccattgacgggacggatcttcatgatttttccgccgacggttttgatgattttccagccgccgacagatgttccgagtcccatggccatggcgcatgcaaactgcacccagaacgggatgtcggttgtactgtgcaagttacccgcgattaaagccatcgtaatgatacccatcgctttctgtgcatcgttcgtgccgtgcgtataggactgaatggcagctgtcgcgatttgaacgcgccgaaaccgcttattcgtttttgccagattgctgttcttaaaaatgactttgacgatgctgtagatcaaatatcctaaaacaaacgccaaaatgggcgataatataagtgcttcaataattttaataaatccgtggtatttaatcgcggcaaatccttccgatgcgatgacagctccggcaatcgctccgatgatcgcatgggatgagctgctgggaatcccgaaataccaggtcactaggttccatgtaatgccggcgataagagcggcaaggatcacgaccgatccgttttcaagcttgaaagggtcggcgatatcgcttgtaattgttttggctacgcctgtgaacgtcatggcgccggcgaagttcatgacagcggccataataatggcatgccttggttttaacgcttttgtcgataccgaggtggcgatcgcatttgccgtatcatgaaagccgttgataaagtcaaatgccaaagcaaagatgacaatcaatatggttaatacaaataaaagatccattataatccctcgttacgcatttttcattatgatggtttctaaattgtttgctacactttggcatgaatctgcgatttcttcaagcgtctcatagatttctctgtactggatcactttaatcggatctgtctctttaccgaaaagatttttcagcgatttgcggtgcaggttatcgcagttatgttcgtattctttaattttaatggcgtgcggctgaatttctttcaggcgattttccgccagcaattcgatcgtcaccagaatttcttttgcgcattctctgatatagccgctgaatttgtcaatatgctcatctgaagatgtgatcgagaatatttccatcatggctgaaaagtgctcgatgccgtcgagtacatcatcgaggctgtttgtaagctgaaggatgtcttcgcgttcaatcggcgtgataaatgctttgttcagctccttaatcatcgtatgtacatagttatctccttttgtctcatactcttttaaggtatccgcgaattctttaagggttgtctgattcgtcactttatagttaacaaaatactcagctgtttcatctaaattttttgcaatttccgtcaaaagcacggaaaacttgtctttttttcttttcaacatttgtaaccctccattgtttaaatgagacaatgcacacatcaaaatattatataactttttgtcgaaaaaaaacaggtgcagtcgaaaaaaacaattaattttcaaatcgtcataccttttagataggcgcaagcaccagctggcatccgggattttaagatgacaataggcgatttttcctttgatatcatcgttccaaaagaacggatctcaggatcgtttcgagaaatttgggagtttaggttcaaaaaaatagaaaattgggagtttttcttattttcagtccgctttcctgttatagtagtaataaactggaaaggaaggtgatctgatgagacggttagctttcttagttgttgcgttttgcttggcggttggttgctttttcagtccggtgtcgaaagcagaaggagtcatgagcgggggagatggtgataaagtcgccgtcgggaaagacggtatggtggctacggcccatccgcttgcatcaaaaatcggagccgaagttttgaaaaagggcgggaatgccattgatgcagctattgcgatccagtacgcactgaatgtaacagagccgatgatgtctggaatcggcggcggcggtttcatgatggtctacgacggcgagacgaaggaaacgtcgatcatcaacagcagggagcgtgctccggagggagccaagcctgacatgtttttggatggagacggaaaggtgattccgttttcagaaaggtcgagacacggaaatgcggtcggtgtgccgggaacgctgaaagggcttgaagcagcgcataagaagtggggaacaaagaaaatggaagacttgatttcgccttctataaagcttgcagaggaagggttcccaatcgactcggttttggctgacgcgataaaggatcatcaggacaagctgagcaaaacggccgcaaaggatattttccttccggacggtgaacctttgaaagaaggcgatatccttgtacaaaaggatttggccaaaacgtttaaattgatacggaaagaagggtcaaaagccttttatgatggggaaatcggccgggcgattgcagatgtcgtgcaggatttcgggggttcaatgacacctgatgacctgtcccgctacgaggtcacaacagataagcccatctggggcgagtaccacggctatgatattgcaagcatgcctcctccaagctcaggcggagtgttcatgctgcagatgctgaaattgattgatgattttcatttatcgcaatacgatccaaagtcgtttgaaaaatatcatctgctcgcggaaacgatgcatctctcctatgcggacagggctgcatatgcgggcgatccggaatttgtcgatgttccgctcagagggctgctcgatcccgattatattaaggagcggcaaaagctgatcagccttgattcgatgaaccgcgatgtgaaagagggcgatccgtggaaatatgaggaaggcgagccgaattatgagatcgtgcctcagcctgaagataaaacgatcggggagacgacgcattttaccgtcacggatcagtggggcaatgttgtctcttatacgacaacgattgaacagctttttggaacggggattttagtgcccgggtacggactgtttttgaacaatgaactgaccgattttgatgcggttccaggcggcgccaacgaagtgcagccgaataaaaggccgctttcaagcatgacgccgacgatcgtattcaaagatgaaaaaccggtgctgactgtcggttcccctggcggaacgacgatcattgcttccgttttccagacgatcttgaattattttgagtacggcatgagccttcaggatgcgattgaagagccgaggatctatacgaacagcctgacttcgtaccgctatgaatccggaatgccggaggatgtcagacggaagctcaatgacttcggccacaaattcggctcgaatccggttgatatcggcaatgtccaaagcattttcattgaccgggagaacaaaacgtttatgggggttgccgattcaagcagaaacggaacggcggttggggtcaacattaagacatcggctaaatagcggagcaaggcttggtctaaagtatttagatcaagccttcttccgtcagcggggaaaagaggatttttttcgaaagaatagaaatatattttttgaaagcgtttaccaatttataaaggaggggtaccatgattcacacgttggcaaatggattttaccgcttttgcgagtgggtgatgcggcttgcctatttgaatctgctgtggatcggctttacgctggcgggagcggtcatcttcggtttagcgccggcgaccgccgcgatgttcgctgtgactagacagtggacgctgggaaaaacggatgtcccggtgtttcagacgttttttcgggcgtttaaaaagaaatgggccaaatcaagcgttctcggtttgatattgggtctggtcggcttattgctgtttgttgattttcagattgcggccgtctattttcacgatcagccagtgtttttaagcctgttcatcagtttgtttatcatttatgccatcatcctcttatacgcttttccaattgatgtccactacgatttaaaacggattgcagtgctgaaatacagcttcatcatcggcttttcccgtccgctcacctcgtttttcatgctgatcagcgcgtttggcatgattctgctcgctttatttcatgtcacatttcttctgtttttcagcggcagcgctttaagcttcattttgacgaagctttcgtttcaggcattccgtgcaatcgacgggcgccggacagacaagcaggctgccgccccacgcttgaaatgaaggtgttcgttcggtgaaccggtatcagcatttaaaaattaaagatcaattgtttattttgatttcactgatcatggccgtttcgctcatcctgatcttgagcggcattcaatacgcgttccgggtatatgaccagcagatttacaggaagtcgtcacaggtgctgatgctatcatcaaaaagcattgaagatgaattgaaaaagattgaggatgtgtcatatcaaatcaccactgacgcagacatccaagcgaacctcctgaaagccggccgcggccagaacaaatacggacgctaccggataaaaagcaaaatttgggataagctggccgaatataccggctctaagcggtacattaaatcgattcatttgtttgatgcttccggcaccgagtactccgcaggggcgaatttaaccgaagcattgcgggagcaaaagaatgcactgatcgaaaaagcgtcgcgccaaaaaggcagcaacatgtgggagcccatgccgggtgaaaccggcgagctgttatccgtccgggaaatccgctcctatgagcgtttaaaccttgaccacctgggaacagtggtgattgtcgccgatttaaaacgggtgatcggcgatcttccgaaagactggggggaaggcgcgggcaagattgcgatgtcggacgggcgggagctgtttttttctgaaatgcctttcagccaaaccgatggcctccgattgtcttctcatgctgaaaacggatatgacattgtggaggaaaacggccagcggtttttcgtttcatatgtcaaatcagcgtataagaattggacatattggagcctgatcccctttgacgctatgttttcgaaaatttctgcaatgaagacgatcctgatttccctttttatccttttttttctgattgcggttctctttggaagaaaaatggccaggggcattacgagcccgattgagaagctggtggcggccatgaaaaatgtccaaaacggcgattttaaactggcgccgctcactcgcgctcctttagaccggcaggatgaagtcagcgtcttaaaccgcaacttctttacaatggttgaacggatcaatgaactgattgccgagaactacaagaagcagctgatgctgaaagagacggaattcaaagcgcttcaagcgcaaatcaacccccactttttatacaacacgctcgagtcgatcaactggcttgcaaaaacgaaccggcagccgcaaatttcaaagatgacggaatctctagggtttttgctcagaaatgccatcaatgtgaaaaccgacgtgctgacgatcgaggaagaagctgaaatcgtgcgccactattttacgattcagcggtttcgctttgaggagaggctcgtttttgagctcgacattgagccggctgtgaaaaaatgccgcgtacctaagcttgttctccagcctttggctgaaaacgcgattacatattgccttgagcccttcattgaaccttgccatattcaaatcaaagcatataaaaaaggagagtttgtctatttaaaggttgccgacaacggccccggcatggatgaagactttttggaaaaggcgagaaaggagcttgtccggacaagagggagaggaatcgggctgctaaatatcgacgagcgcattcagctgatgtttggcaaagggtatggcttgacgatttcaagcgaaaagaataagggaaccgagatgatgattaaaataccatttcaaagcggggtgtgatgatgtataaagtgctgttggcggacgatgaacggattattcttgacggcatctccagcatgatcgagtggaattcgttcgggacttctttgatcggggccgcacagaacgggattgatgcttaccgcctgattatggaaaagcggccggacattgtgatcagcgatattaaaatgcctgggatgggaggactcgaactgatcgaaaaagtgtcccgcgaccacccgtcaatccggtttattttgctgacgggcttcggccagtttgaatatgctaaaaaagcgatgtcatacggagtcaggcattatttgctcaaaccctgcaatgagagccatattacagattcgcttcaaagcgtgatcggcgagctgaaaaaagaggaatcggcgcaaaaagtgaaaaccgatctggagatgatgaagccgcatcttatgaagcagatgttaaaagagctgatcaccggaggcggcatcgaggatgaagcgtgcctgcgccttttttcagagcaaaaggccatcaggctgatcctgttttccgtccgggacggggaggataaagaatatgcacaaggcgttgaatccattgcggatgaggtgctgaacggtgctgtcatcgcctcggcccgggttcagcaattgcttgtctgtgcagtagacggaacattggctcctgccgtgcttgaggaaaaaatgaaaagcgtccaagagctttcacgccgcctgctccgatttgaaccagaagcatcactcagcgaaagcggcaatatcagcgaagcctccgcgatgtacgaaaaggcatatagaaagatcgtccaagatgaaggggagacatcggttttaatcggaaggatgcttgatctcatcgaaaaggaggcctcaaatccgaagctttcgctaaagtgggcagcccgcaacatgctgtatatgaatccggattatctcggcaagctgtttaaacaggaaaccggtgagaagttttcaagctatgtcgcaaaggtgcgcatcgaaaaagcgatcgcgaagatgaagaagtctaaaaacacggccatcggcacgctggcagaggaactggggtttggccacaatccaaaatacttcagccttgtctttaaaaaatacacgggactcaccccgtcagaatttcgaaaaaaagaagacaacacgttttaatgccgccgggtttatccggcggttttttgcgcattgacggaatctctgtttttttaacattcttctctgttttttgagtttctgggacagaaagctgaatttaaaatgaaatgtaagcacttacaaattggggagggggaatgttgatgagaagatttgtgtttgtctctttgtgcattttgctgacgctcggcctgttcggatgcagttcaaacactgaagaggcggccggtgcggacggcaaaaagaaggttaccttaagggtcgcatggtggggcggacagcctcggcatgattatacatcaaaaatcattgagctatatgaaaaggaacatccgcatgtcaaaatcgaagcggagtttgcgaattgggacgattattggaaaaagcttgccccgatgtccgcggcagggcagctgcccgatgtgattcaaatggatatggcgtatttatcccaatacggcaagaaaggccagcttgaagatctgactccgtatgtcaaagacggggcgatcaacaccgaatcgattgatgaaaagacgatcaaaggcggaaaaatcggtgatcagctatacggcttcccgctcggtgtgaatgtactgtcggtgattaccaatgacgacttgctaaaagaagcgggcgtcgagattgacgatggcagctggacgtggaccgattttgaaaacctggcgctagaggtcgaagagaagacgggacaatacggttcaaacggcatgcatccgcccgatgtctttttcccgtactacctcaggacaaagggcgagcgcttctataaagaggacggcacaggccttgcttattcagacgacaagctgtttgtcgattacttcaagcggcaggtgaagctcgtcgatgaaaaagcttcgccgacgcctgatgaaagcgcgcaggtgaaggggatggaagacgattttatcgtcaaaggccgaaccgctgcaacatggaattattcaaatcagtttgcggcgttcgcgcagcttaccgatgcgcccctgtcattaaagctgcctcctgaacaggcgaaggaaaaggcgctgtttttaaggccgagcatgctgttttcaattccgaaaagctccgaacagaaaaaagaagcggctgcatttatcgacttctttattaacaatgaaaaagccaatgccctgatcaaaggagaaagaggcgtaccggtctcctccaaaatagcggaaacagtgaagtcagaactgagcgaagaggagaaaaagattttcgaatatgtcgaaagggctacagcgtacgcgggagaagcggaaccgcctgagccaatcggcagcgccgaagtcatcaagctgctaaaagacacgtcagaccaaattttgtttaaaaagatcacgcctgaagaaggagccgcgaagttcagaaaagaagcggacgccatactgaaaagaaatcaacaatgataagcggggcaagtggaggaaggccgctcatcaaatccaggaggaagtgaacgtgaagcgaaaaaaaagaattgacaatttggcgggttatgcctttatttccccgtttattatcggatttttgtgctttaccgtcattccgatgggagcctcgttgtttctgtcttttacaagctacgatctgttcaccccgcccaaatgggtcggctttgacaactataaggcgatgctgaccgatgatgaaaaatactggggttcgctgaaagttacgttttattacgtgctcgccggtgtgccgctgcgcctcgcgtttgcgcttttcatcgcggtgattttgaacagagccgaaaagggtgtgggcatttaccggacgctcttttatctcccgtccatcatcggcggcagcgtggcggttgcgattatgtggcgcaatgtatttggcaatgacggtgtcatcaatgggcttttgttcttccttggttttgacaagaagattttttggtatcaggacccgacaagcgcattgtggaccttgattcttttgtctgtgtggcagttcggctcttccatgctgatctttcttgccggattgaaaaatattccgccgatgtatcaggaagcggcaagcgttgatggtgcaaacaggtttcagcggttttttctcattacgctcccgcttctcagcccgatcatcttttttaatttggtgatgcagaccatttcagccttcatgacctttacgccggcctacattatttcaaaaggggaaggcggtccgcttgacgggacgcttctgtattccctctatttgttccagcgggcgttcaactttttccaaatgggctacgcttcggctatggcatgggtgatgctgatcctgatcggccttgtcacattcatattgttcaaaacttcatccttatgggtgcattacgaatcgaaggaggggtagctggtggagccggtaaaagatatttcggggcgggccgcgcctgccccgcttcctgcgggaaatagaaagaaaagagccgggcaactcgtgtttcatatcacgacggccggtcttgcgatcatccttttgtatcccgttatctggctgatcgcaagctcgtttaaagaaagtgcgagcatattcgccacatcccactcgctcattccggaccccttgatcctgtccaattatacggagggctggaaagggatcgccggacagccgttcatcacattcattaaaaattcgcttatcattgtcggcctttcgacggccggcgcggtcttgtcctcggcgttcatcgcttacggattcgcgcggattccgtttaaagggaaggcgttttggtttagctgcatgatggtgacgatgatgctgccgcacgaggtgctgatgattccgcagtacatcatttttgcaaagctggattggctgaattcattcaagccgatcgttgttccccaatttttcgggcacgcgttttttatctttctgatgattcagttcatcaggacgatcccggtagaactcgatgaagcggcaaagattgacggctgcagccgtctcggcatctttttcagaattattttgccattgatcgcaccggcgctcgcgacgtccgccatcttctcgttttactggaagtgggaggaactgatcaatccgcttctttacttgaacaagccggagctttacccggtttctctggcattaaagctgtttttagatacggaaacggcgtctaactggggggcgatgtttgcgatgtcagtcgtctcactcgtcccggtgatcctcgtgtttttcgtttttcaaaaatcgatcgtccaaggaatcagcatgagcggattaaaataaaaaggagagaagagtgcatgacaaagcttgtttttgatgaagaaaaactcaatcaagtgatcgacagaatcgttaagcggacatttgagatggatttcgaatgggattggccgggcggcgtcgcgttttacggcgtggctgaggcgtatgaagcaaccgaaaatgaagaatacctcgagcttttgaaaaactggacggatgaaaagcttgaagacggattgcctaagctgtcgatcaacggagtatccatcggccataccctcatatcgctctaccaggcgacaggagatgaccgttatctggacgccgcccggcaaatggcggactatgtgctccacgaagcgcctcggttcgcagacggggttttgcagcacaccgtcaactcagagaaacatgtattccctgaacaggcatgggtcgatacgatgatgatggcgggcttgttccttctccgaatcggaaagcttgtcggcagcgaggaatattttgaagacgggctgcgccagtatcacggccatgaagaatttttgcaggatatggagaccaatctttattatcacgcatgggaccatgtggccaaaaacaacctgtcaggcatattttggggaaggggaaacggatgggcagctttaacgatggcaaaagcgctccctttaatcgatgttacgcatccgtcttatatgatcattgacggttcgctccgggacttgctgagcgcgcttgtcaggcttcagcatccctcaggtttatggcacaccgtactgacggacccggattcataccttgaagtgtcaggctctgccgggattgcatccggtttgctgtcaagaggctcgctataccacaaatccgttcagaaggcgctctcagccattacggatgcggtcgcgcctgacggaagggtggagcgcgtttctgcgggtacagcagtgatgcgggatgcgcagggttacaaagacgttccgtataaacggattcaaggctggggacaggggcttgccctgacctttttggcagatgtcgtccgctccaagtcgcgcgcgttccaatagaaattgaaaaaagaaacattcttttcattgcagtggggggaaaagggatgaaaaagctgcatcaaagatatgtttcacggcgtaaagggaggttttttaaaaaaagctttgtgatgatcctgctgattgcgtgtattcccggcttattgacgggtgcaggagtctatttgttttcggctgcgaaaattgaaaaagagctccaacatctgcacgagaaccaggtgaaacgccaaatcagccaaatcgatgacaagctggaagggcttgagatcatgctctcccagcttgcatatgatccgcgcctgatgaacggtctggccgatgccgatctgcaaacggattttcaaacgacgtacaagctctcaaaatcgctgtttttgcttcaggatcaaaatccgctcattcacaaggttgaactgttcattcaagggaaggagccgattctcttaaatccagaatacagcggactgaccgaccggaaaatcttgaaggcttatcattcgctgcttgaaggcggtcaaaacgtctattggaaagacatgagcggcgcttcatccggaatggcccttgtccataaaattccgggaggcatctcagaaccgttcggcgcgctgattttgacgcttgacgaaagagaattgggccggttgcttgagagcctttcgccgtattcaaagggaacagcgctcctttttcatcataatcagaagcctgtttcttggagcaatcgcggcaaaaccaactttgaaagcgccttaaaagaaaggcttgagaaacaaaaaaatccacagggctcctttgttatggattggagcggaggtgcgtattccgtttcatacggacgaatggacagattgaaccaggaatggacctatgtttcggcttcaccgatgtcggccattacggctccggtgctgtttttatcgaagctcatcgcgtcggtcagcatcgccgggatcgttcttgccttcattctggcatggtatgcgtcacacaaaatttattcacctgtcgcaaggctgatcaagctctgctccggagagggaaaggcggcctattttccggatgaatttcattggctcgagaagcgctgggaagacctatctgaggaaagcggcagactgaaaaaggaactgccccatgctgcaaacgttttttttcagcgccttctgagcggatactttgcagatgaatcagagaggaatttgagagatcgtctgaaaaggtggggctgggaagcaaaagacaatgtgtttaccatcatcgatgtccagctgacgggactctacgaaggaaacggatcttttacaaaaaaggatgaaagtctggcgggctttctgttgggaaacattacgcgcgaactggctggaaggacattcaaccatatttatatgacagatgtccgttcgctatcgcttgcggtgctgctggcgagcggccggaatacagccttcaaggaagaaatcgcccaatttgtgcgtgagctgacagatgtgatctacagcatatccaaactgcacgtcacagtgacggtatcaaaaaccgctgacaagttaaaagacattcccggcatttatgaagaggtgaaagaaggcaggcattacagacagttcgaaaacgccagccaggtgatcgatttaagccggcgggaagacatgcctcccgctgaatcatactatccgttcgctcttgaaaaagaggtagtcagggcgttgcggcttgaagaaagggatgaagtcgaaagaaggatcaggctgtttatccgggagctgtccgaaaaaggaaaaacggaaatccgcatccagccgggcatgatgcagctgttcgcaaagatccaagaagagatctttcattccggccttcacccctatgaattgttcagccgaaaaaacctgcttcaggagctttcggagctgagggagccggaaagggctgtcggctggatgatggagcgttgcataagcccttatcttaaagagatggaaggaaggaaaaacagacagcaaaaacggcttgtcgaacaggtgcttgagatgattcatcaggattatatgaacgatatctcgcttgaaagctgcgctgatcgggccgggacgaattcgtataccctgagcaaagctttcaaacaagtaaccggcatcaattttatcgactatgttacccggctcagaatcgaaaaagcgaaagagctgcttcttgagacgaataaaaaaatccatgacgtttctgaagaggtcggctacagacacagctatttcaaccggattttcaagaagcaggtcggcattccgccgagccgctacaggcagattcatcaggaatcttcgtgaaagggagagtgctatgaaacgaacagacaaaaaaccgaaagtgacagtatatttggccggggactcgaccgtcgcagactgtcccccgcatgaagcgccgatggccggctgggggcagatgcttccgctgtttttctcagatgaggctgcggtcgtgaatatggcaaaaggcggggccagttcgaacagcttcattgatgaaggccggctcgatgacattacggagcggcttgcgcctggtgattatgtgttgatccagttcggccacaacgatcaaaaaccgtacggaacagacccttatacaacctatcaggagcatcttgtccgctatgtggaagcggttcgcgaaaaacaagcgacaccggttttgatcacttccgcagagcgcagacgttttgatcaaaacggaaagcccgccgacacactcggggattttccgaaagcgatgaaggcgctcgctgacagcttcgacgttccgctgatcgatttatggtccaaaacaaaagcgctctatgaatctctcggaatcgaaggttcaaaacggctgtttgtccactttcagcctcatgagcaccctcattatccaaatggaatcgaagacaatacccatttttccgaagcaggggcccgtcaagtcgccaggctggtgacaggaggaatcagagagcttggtctgcctctatcggcttatctgctttgtgaaaggagcgatttccgtgccggagtgtaatggaagagaaggaagcctgatttatcaaaaccctttatcttctcctgaagatctccgcggctgggtgatggaagggaaaggaatcgttcgttttcagaacggccgcctgcatatggagaacgaacttgacgctgagcaatatggggacgatgctcattttgtttactggtgccctgagacattccctgatggaattgttgtgaagtgggatttctaccctgtgcgggagcctggcttatgcatgatattttttgcagccgccggcatgaatggcgaagatttatttgacgggcggctggcggagaggacggggaaatatccgcaatatcattccggggacatcaacacattgcacctgtcgtatttcagacataagcatgctgatgaaagagcattccgaacatgcaacctcaggaaaagccgcggctttcacctcgtctgtgaaggagctgatccgcttccgcccgctgcagacgctttgcctccctaccggatgaagctcataaaggacggggcatacgttcgtttttcaatcaacgagctgcccattttggaatggacggatgacggcaggcgtttcggccctgtttacggcgcaggaaagatcggcttcagacaaatggctccgctggaagcagcctacgccaactttgaagtgcgcaggctgctgcgcggctgaaaggaggagcggacatgcgggataaaggcgtaatggcgatgatgtacggcgcgtgtgaagcgatcatgaaaatcgcctggctgaacgggatctgggttttattcacgctgggaggaggcattgttttcggctgggcgccgagcacggctgcgatgttcacggtcgtgcgcaagtggctgctcggccggacggacgcaccgctgttcaaaacgttttatcaaacgtataaaaaagagtttttcaaagcaaacggacttgggctcatcctcattaccgccggaacaattttattcgtaaactatcaatttttccgcgtccgtgcggatttattttcgatcatgatcagctatgccacactggtggccgggctcatctatctcgtggttttcatttatatttttccgctttacgttcatgttcagctgccgtttgtccgctatttttcacaggctgcgctgatcggtctcgttcgccctttgacgacggccggaatggctgctgctggttgcttggtcgtgtatgtgctgttgacggttccgggtctgatcccattttatggtgtcagtttgtttgctcttgtatcgatgtttatcgcacatcgctgttttttgcgtctggaaggctagctgaactgtgcaaaaatgagaaaatcgggcaaaaaaatatcaattggaaaggctgaaccgcttaagaccggacttgaacacatcttttcccttcggcaaaaaagtgcaattgaataaaaatggaagccgtaatagaatcccttttgagtaagcgcttacaaaaatggtgaagggagaagatgatgaaaaaaggaaagaaaaggtggaagaacctgttggccgcgtcatctcttttattaatcacgctagtgaccggcttctcggagcaagctgatcagacgggcggacggctgcgcaggcaaggcaaatggaatcgcttaacagggggcttgtcgctgttaaaacggggaacggtgtctttgtcagctggcggcttctgggaaccgagccgtcttctgtttcatttaatgtgtatcgaaacggaaagaagctgaacggttctccgattacatcgagcacaaactatcaggatgcaggcggggatttgaacgccgtttaccaggtgcgcgccgttttgaacggcagggagcaggctccttctgaatccgtcggcgtattgaataaacaatataaatctgttccgctgcaaaaaccggccggaggaaaaacgcctgatggggtgtcatacacatacagcgccaatgatgcgagcgtaggcgaccttgatggagacggccaatatgaaatcattctcaagtgggatccttccaattcaaaggataattcacaggacggatacacgggagatgtgctgattgacgcatacaagcttgacggcaccatgatgtggagaatcaaccttggcaaaaatattcgcgccggcgcccattatacgcagtttctcgtctatgactttgacggcgatggaaaagcggaaatcgccatgaagacggcagacgggacgaaggacggcaaagggaaggtgatcggcaatgcaaacgccgattaccgcaatgcccaaggccgaattttgtcagggcctgagtatttgacggtttttaaaggcgatacaggcgctgagcttacaacggtcaactacgaacctgcccggggaaatgtagccgattggggagacagctacggcaacagggttgaccgctttctggccggtgtcgcataccttgacggggagcggccgagttttgtcatggcacgcggttattacacgagaacagtgctagtcgcttacaacttcagaggcggaaagctgaccaagctgtggacgttcgattcggatgctcccggaaatggcgcctatgccggtcaaggcaaccacagtttgagcgtcgccgacgttgacggagatggaaaggacgagatcatatacggagcgatggctgtcgatcatgacggaaaaggcctctactcaaccggctggggacatggggatgccatgcatacagggaacctggacccgtcaaggcctggactggaagtcttccaagtccatgaaaacagcaattctccttatggcttgtccttccgcgatgcgaaaacaggaaagatcatctggggagttcacgcaggtaaagatgtcggacgcggaatggccgctgatatcgatccgcgctacgaaggagcggaagtatgggcgaacggcagtctttatacggcaaaaggcgtaaaaatcggaaacacattgccttcatcaacgaacttcggcatctggtgggacggcgatctccaaagagagcttctggacagcaacagaattgataaatgggattatcaaaattcgcgaaccgtcaacttgctgacagcgtccggagcttcggcaaataacggaacaaaagcgacgccgtccctgcaggcggacattctcggagactggcgcgaagaagtggtctggcgagcggaggacagcagcgaactgcgcatctacacgacgacagacgtgacggagcaccgcatgtatacgctgatgcatgatgcagtctatcgcctcggtatcgcctggcagaatgtcggctacaaccagcctccgcacaccggcttttatttaggcgaaggcatgcagacaccggagaagccgaacatttatacacgctgatgataaaggggagctgcataatgaagcgatatgttcgctgcttatgggtcatccccctccttttctttttcatcatgggaatgggggacctgcgcagccgaaagccgctgccgcgcatcacagtcaggatctttttctgttcgattttggaaaaggtcccgctgagaaggattatgtgaaagtgaacgagtcctccgtgtatcaaaatggtgctggctacggattttctcaggcaggaagcgctgtgtgcaaaaagacgcaaaaaaaagaagcgctcaaaaaagactattgtatcgtgaaccggacggcttttctggcagatctctcccccggcaaataccgcgtgaccgtttttgcatcatccagcggtgaattgaagctttatgccgaaggagaaaaaatggggacgatcccggccggagcaaagggaagctcagccgaaaaagcgttcaccgtttcggtggaagacgggcgcctcgatctggagtgaaggggcctcagccaaaggtgtatgccatcgaaatttcgaggtgtatcagttcgatttcggtgacgggcctcttgcttcgggttttattccggtaggcgctgcttcggcctatacccctctaaaaggctacggatttgacgacgcggcaaaggtgtcctgcacggaccgaggtacggccgacccgcttcgttcagacttctgcattccggatgggacggcgtttactgtcgatttgcctgacggtcaatatcaagtccaaatcataaccggagatgcgcgggcaaagacgaacatggacgtacgggcaaacggcatgctccagctgtattcgtttggagcggaagcgggcggatacaacgaaaaaacgtttccgattcatatttccggcggccgtctttcgatccaagccttaacggcgagaacaatgccgcgccttaatgcgttggtcattacgaagacggcttatcatgtgacggatgacaacacgacggtctttctggcgggcgattccacggtctccgattatgagcccggctatgcgccgatggcaggctgggggcaatttttaggcggctatttctcggatgaaatcgtcatcgacaaccaggcgaaacgcgcgagaagcgcgaaaagttttgtggatgaacggtcgctggctacgattttgaaccggatgaaacggggcgactatttgttgattcagttcggcattaatgacgcagggcaagatcctgcccgccatacagatccgtatacgacatttcaggaatacttgagaacatatattaacaaagcccgcgaaaaaggaggacgtcatgtgctcgtcacttctcaaagcaaacgtacctatgatgaaaagggcgttttctacaacagcatcggagaatatccgaacgcaatgagacagctgggacgggaaatgaacgttccggtgatcgatttaaacaaaaaaagcattgaatattacaacgagatcggcgttgaagcgactaaaaacgtatttatgtttctggaaccgggagaaagcccgaattatccggaaggcatccaggacagggtgcattttcacgagttcggcgccaaccaattggcaaggctcgtcacaggagaaatctccgatttgaatatatatccgctgaaacactcgctcaagaaataaggtgtcgggagatccggtctccggctctcccgttcgccattccaaaccgcaaagggggagagaggactatgggagaaaaggacagacatgcagcagctgatcgcgttcgtccggtgaaaacggcggcaaaaccgaagcaaatggaacacttaaaccgcggccttgtggcggtaaaaacaaaaaagggggtttttctcagctggcggctcttaggaaccgatccggaagaaaccgcttttaatctataccgcaacggacaaagaatcaattcaacacccatttcatcatcgaccaactttcttgataaacacggaaatggaaaatcgctttattatgtgtccaaggttctcggagataaggaagtcgagacgtcgcccaaaacagctgtctggcagaagccttacttggaagttccgttaaacaagcctgacggcgggacaactcctgacggcgcaccgtatacgtacagtgcaaatgacgcgagcatcggagatctcgacggcgatggagaatacgaaattgtgctcaaatgggacccgtcaaattcgaaagataacgcgcacaacggctataccggagaagtcatcatcgatgcctataagcttgacgggacattcatgtggagggttcatctcgggaagaacatccgcgcgggcgcccattatacccaattgatggtctatgatcttgacggcgacgggaaagcggaaattgctatgaagacggctgacggaacagttgacggaaccggccgggtgatcggcgatcaggctgccgattacagaaatgaaggtgggcgaattctggccggccctgaatatttgtcgatttttcacggggaaacgggaagggaattggcaaccgtggattacgatccgccgcgcggaaggcttgaggactggggagatggatacggcaaccgcatggatcggtttttggcaggcatcgcctatttggacggcgaaaggccgagccttgtcatggcccgcggctattacacaagaacggtgctagtcgcttacaacttccgagacggcaagctgaccaagctgtggacgtttgacagcgacaagcccggaaatgaaggctatgccgggcagggaaaccatagtctgagcgtcgctgatgtcgacggtgacgggaaagatgagatcatctacggcgcgatggccgttgatcatgacggaacagggctttatacgacagggcttggacacggtgatgccatgcacgtgagcgatcttgacccggaccggccggggctggaagtctttcaggtgcatgaagatccgcgccttccgtacggcctctcatttcgcgatgcgggtacaggggaaattctctggggagtgccggccgatacagatgttgggcggggaatagccgcgcatatcgatccccgctgctataaaggagcgcttgtctgggcgatcgatccaccgggcaatgaaggaaaatcgtacggcctctatacgagtaagggagaaaagctcagcgatgccgctccggcttcggccaattttgcgatttggtgggacggcgatcttctccgcgagctgcttgaccacgattggaaagaacccgcaggcatccccaaaattgataaatgggactatcacagcggcaggctggtcaatctgctcaccgctgacggaacgctgtctaacaattggacgaaagggacgccagtgcttcaggccaatttgttcggcgattggcgcgaagatgtcgtgttccgcacagtccgaagcgatgctctgcgaatttacacaacgaccgagccgactgaacaccgtttctatacgttcatgcacgatcccgtctaccgcctgggggtagcctggcaaaatgtcgcttacaatcagccgcctcatcccgggttttatgtgggaaccggaatggacaagccgccccggccgaatatttataccgttccttgtaagagaaatgaagaatgaaagagaacggcggttcagcatgcgctgggcccggggcaccggcagaaatattcaacttacaaaaaagtatgattgtaatcttacagcctgttccataaaatgattggtaagcattttcattacaaaatgaaaagggggatccatatggggtatcaggcgagtgatgtacgctatgaaaatatgaaatacaacctctgcgggcattcaggattaaaactgcctgctttgtctttagggctttggcacaatttcggagaagcggcttccttgcaaaatgccaaagcgctgttaagaaaagcatttgacctgggtatcacccactttgacttggcgaataattacggtccgccgcccggttctgccgaagaaacattcggaaaagcgctgaaaaccgattttgccggctaccgcgatgaaatggtcatcagcacgaaagccggctatacgatgtggcccggaccatacggcgattggggatcaaaaaagtatctcgtggcgagccttgatcaaagtttaaaacgaatgggcatcgattatgtcgatatattttattcacaccgccctgacccccatacaccgctggaagagacgatgggagcgctcgcccacatcgtcaggcaaggaaaagctttatatgtcggtttgtcgaactacagtgctgaacagaccgaaaaggcggctgatattttgcaagaatacgggattccgctcctcatccatcagcccaaatattcaatgttccacagagaaccggaaaaaggcctgctgcaagtgctgcagaaaaaaggagccggggcgatcgcgtttacacctcttgcccaagggcttttaacaacgaaatatttgacagggattcccgccgggtcaagagccgctgatgcgaacagtccgtttttgcaggccgagggcatcacagaagacgtgctcggcaaggtccgcaagttgaatcaagtggctgccgaacgcggccagtctcttccgcaaatggcgatagcctggctattaaaagacccgcgcgtcacctcggtgctgatcggcgcgagcaaaaccgaacagatcgaagaaaatgccgcggcgcttaagtccgctcgattctcagctgaagaactcgacacaattgataaaattctttcataaataaggagtggtcgtgatgacaatcagcatctatttggccggcgattcgaccgtgcagcattataaggctgattcgcctcagggaggctggggcgaatttctccagtcttatttatccggaaatgtacaggtgatcaaccgggcaatcgggggccggagttcaaaaacgttcgttgaagaaggaagacttgcatctattttggatgtgatcaaacaggatgattggctgttcgttcagatggggcacaatgatgcgtcgaaagacaaaccagaacgctatacagagccgtatacgacgtataaacaatacttgaaaatgtacgttgacggcgcgcgtcaaaaaggggcatcgccgcttctcatcacacctgtcgcaaggctccattacaaagacggcgtctttttaaacgatttcccggactactgcattgcgatgaagcaggtcgcaagcgaagaaaacgtccgcttgatcgatttaatggacaaaagccttcagcattttgcggaaaaaggatacaacgaagtatttaaatattttatgatctcggaaaatgtcaacgactatacacattttacgaaaaaaggggcccgggaaatggcgaagctcgtctcggagggcattcgagagcttgggctgccgtttgtcaaagagacggtatgaagatgaacggaaagctgtaccatggcgcttgcttttatcccgaattgtgggatgaggatgtgctggatgaagatatcaggatgatggagcgaatcgggatcaatgttgtcagaatcggggagtttgcctggtcaaggatggagcctgaaaaaggaaggatcgatgtcggattttttgcagacgtcatccgaaagctccgcgacaacaaaattgaaacggtcatgtgcacgccgactgcgacgccgccgatctggctgacccacgggcacccggaaagaatgcatgtgaatgaaaaaggggagacgatgggacacggttcgaggcagcatgcctgcacaaaccatccctatttcagagagcgggcccggctgatcatcaaacatatcgccaaagagatcggagaactgccgggattgatcggatggcagcttgacaatgaattcaaatgccatgtcgcagaatgcatatgtgaaacgtgccgcacattatggcacaaatggctggaagaccgctatcagacgattgaccgtctgaatgaggcatggggtacgggcgtatggagcgaaacgtatcagtgcttcgagcaagtcccgcagcccggaccgaccccgtttttgcataattcttctttaaggacaatgtatcagctgttttcgatggacaagatttctgaatttgcgcgtgaacaggctgaggtgatcagagcatactccgatgccccgatcacccataatagcagcgtcatgttcggcgttgatcatgaagaccttttcaagagccttgattttgcctcgtttgatacgtacgccagccaggaaaacagtcaagcctttttgtttaattgtgatttatggagaaacatcaaaaaaggacggccgttttggattatggagacgagcccttcctacagcgcttcgcttgaaagctatgcggtgcctcatcaaaacggctatttgaaagctgaagcggtttcttcttatgctcttggcggagccgcgttctgctattggctgtggcgccagcagagagccgggtctgaacagccgcacggatcagtgctcagcgcatggggggagcctgatgtgggatatgaaaatgtgctcgaagccgagcgggcaagacgagaggttgaacacatcatgctggctacggctcctttgcaggctgaaacagctgtcgtctattcggaccgtgcgaaggtgtttttgaaaacggagcctcatcggggtcttcattacagaacgctgatcaccgagttttatgaccgattattaaagatgggcattcacagggatgtcattcttgaagggagcccgctggacggctacaaactgctgtttacgccgtttattcattatcttccccctgcttttatcaaaaaagccgaagcatttgcacaaagcggcggcatttggattgcgggtccgctgacgggcggaagaacagagcaccatacgattcacactgattgcggattggggcctttagaaaaatgttctggtgttaaaacgctgtttacattcccgatggatgagcggaactcaagcggaacggcgtttggcgtaaaggcgccgctgagcttgtggagcgctgtttttgaagccggcggcaccaaggctgtcgggatgattgagaaaggcccggcgtcaggcaaagcgttcatcacggaacacaaatgcggaaaaggcaaaatcgtcatgctcgggtcgatgccggcaggcgaagcgggggacatcatgatgaaaaagctgatcagccattatgccgaagaagcgggcgttgagcagaaaaccgatgtcactcccggaacagtcgtcgcgccccggaaaggagcagacggtcttgtctgggtcgtgatcaatatggacggcaaaggaggcgcagtgacacttgacggcaacggaaccgatcttttatccggcaggcccgtaaccggacgcgtaacactcggcccgcacgactaccgcgtgattttgttatcagagaataaatgaatcgccgcaggctcttgcccgcggcttttttggtttgttttgcaaaaaacgatgattcctgcaaaaaaggagttggcatcccgctatcataagcaaaaaaggaatattgacggtcaataggctaaacaggaaaatattcactgaccaatcggttgaacagaaaggaggaacgcttgtgaaagcacaggctgaactaaaatggctgaatagagcgcctgcttcgttcggcggggtgacttggggagtgccttgggcaaaaggagtgctgcaaaaaggggagacggccgtcatcgcttcggaaaacgccccgtatttgcaaacatggccgcttgcatattggcctgacggctcgattaaatggacgggccatgccgcagtattcccagaagaaagcggacgccgatttacattgcaaaaaggaaagcccggcgcgccgaaaaccgtcgtccgtgtcagcgagcagaaagacgaaatcacggtgaatacgggcgcgatagtctgcaagctcggaaagtcggggccggcactgatccgttcgatttccatttccggggaaatgatggcgaaagaaggacggctcatcgctttaaaagaaaaaagaagcggttcagatacacaaagcatgtattatattgaacggtttgagagcttggtcaaacgtgcggcaatcgaacaaaacggtccggtcaagacagtcatcaagattgaaggcgtccaccgcggcggaggcatcgatgtttggctcccttttaccgtcaggctttctttctatgccggtgtcccgtccatccggatcgtgcacacgatcttcatcgactgtaacgcagaaacggaatggatcaaaggactcggtttagagatgagcgcggttttgagcggagcgccaagaaacaggcatattcgctatgcagccgacggaggaatttacggagaggcttctcagctgcttgtgacgagaagatttaatgaaacaaacgggttctatgaacgacagatagccggacagcctgtcccggaagagtcggaagtcgtgcgtgatgcagagaaaaacgccgtctggaacgatttcaagctcattcaggattcccctgttcactggcgcttaaaaaagcgaaccggcaaagactgcgcctgggtggacgcgattcatggggggagagcgaaagggctgatgtatgcaggcggggaaaatggcggcatcgcgctcggcctcagaaacttctttgaaaaatatccatcatcgcttgaagcgcaaggtcttgccggcggcgaaacaaaattgacggcatggttctggccccctgaagctgaagcgatggacttccgccattattcaaaaggcactcacgttgaaagcgcatatgaagggtttgccgaaatgaggtcgacggctgtcggcattgccaatacgagcgaagtcaacctcgcctgtttttcaaatccgccgagtaatgaagagctgaacagagcggcggacgaatggcaaaatcccccattgcttatttgtgagcctgactattattatgacacccgcgctttgggtgtttggagcctgaaagataaacggcgcccgctctcagctgcgcttgaagatcagctggacgaggctctcaagttttacatgaacgaagtcgaacagcggggctggtacggctattggcattacggtgatgtgatgcatacgtacgatgccgtccggcatgtatggcggtatgacctgggcggctatgcatggcaaaacacggaactcgtaccgaacctctggctttggcagtctttttttagatccgggagggaagacatcttcagaatggcagaagcgatgactcgtcacactagcgaaatcgactgctaccatttcggggattataaaggcctcggttcaaggcacaatgtcctccattggggctgcggctgcaaggaagcgagaatcagcatggccggcctccacaagccttattattttttgacggcggatgagagaacgggggaagtgttaaccgaggtgaaagatgccgatcgagcgcttgagatgcttgatccgatgagagcctattatccggaaaaagagttccctgcccacgcgagagttggccccgactgggcggcgttctgttccaattggctgacggaatgggagcggaccggtgatgaagcgtaccttgataaaatcaaccggggaatcggccggctcaaagcgctgcctcttcgtctgctgtccgggccgactttcggatacgatcctaaagcttcagatctgcttcatatgggtgacgggaatcatggcggctatcatatggtcatcgcctttggcgccccgcaaacatggatggagcttgcagaactgctggaggataacgaatggaaggagatgctcggcgaattcggcgaattttatttgctggctgatgaagaaaagcgcaagaggagcggcgggaagcttcacgatgatttatttcactggccgatgttctccgctgccatggccgcttatgctgcgaggcttcaccaagaccggaagcttgccgaaaaagcatggcggctgttgctggacgaaaaacaaagccatacaccgctgccgatcgctccaaaacaagtccatgcgtggaacacgatcacggaaatcccttgggtcacgacaaactgcgtctcacaatggtgcctcaacacaatagccgtgctggagctgctcaaggatatgccgcctgatcaggacatgcaagaaaagatcatcaaagcaatgaaagatcatcccgctcgcgtgtgagggcaaaaaatgaaggttgccggaaaaatgtaagcgttttaaattcgagtggaacaatgaaacgatcaaaagggggaattgtaaaatggcaagactgaagctgaagggaaacaagtggctcgctgcacccgctgtctttttgctccttatcgggtgcagtgcaaatgagacgtcgaatcaagacgggaaaggaaaagagaaggatgccattcatattatggctccgctcctctcgccggaaagtccgggagaaaacagtccgtctttaaaagcgctcgaaaaatacacgaaaaaacaaattaaagtgacatgggttccgaactcttcctataatgataaattcaacatcgtcatggcctcgggggatttgccgcaagccattgtcgtcacggacaagtcgccgggttttatcaagtctgtcaaatcaggcgcgttctgggagctttcaccttatttaaaagactacccgaaccttggaaaggccgatgagaaagtgatgaagaacagttccattaacggcgagatttacggcatttacagggcgagggacctcatccgcgcttcgattatcatcagaacggactggctcgaaaatgtcggcctggagatgccgaaaacaatcgacgaattttacgacgtactgaaagcgtttaaagaaaaagaccccgacggaaacggaaaggacgatacgtacggcatggtagtcccgaaatggatggggctaggcaacgggagcccatgggatattatgcagacatggttcggtgctccaaaccgctacggagtagacgaaaaaggggaactcattccggacttcacaacagaagaatatatggaagcgctgcgttttttcaaaaagctgtatgatgaggggctgatcaataaagacttcgccgtaatggattcagcgaagtggaacgatccggtcgtcaaagggaaagctggtgtgatcgtcgataccggttcgcgggcatcgcagatacaaagcgcaatggaggaagccgatcccggaaacaaggatgtgatcgatgtcatcggaacggtcaaaggcccgaaaggaacgtatacattcccgacatcaggatacgccggaatgattgccatcccgaaagcgagcgtcaaaacggaaaaagaactaaaagaagtgctcggcttcttggacaaaatgaacgatgaagaggcacagatcattgccaataacggcgtaaaagggcgcaactataagcttgaaaacggtgcgtacacgtcccttgaaaaaaacaacaaaaaactgctttacgagcacgagggtcttgcgcagttcagcatgggcattccggaacaaagatactatgtggaaaagcaagaatcaaagctgtttaaacaccgtgaacagattcgcaaagaaggggagaaaatcgccgtattcaacccggcagaatcgctcgtttcagatgtatacacccaaaaaggggcacagcttgacaacatcatcctcgatgccaaaacacagtttatcatcggcgacatcgatgaaaaaggctttcaagacgccgttgagctttggtataaaagcgggggcgaagatttgatgaaagaactgaacaaacgctacaaggagactaaatagctcaggtctttaaacagcacacgaaaggggggatgcggcacatggaaatcaccgcaaaaacagggaagcccgctgttaagacagaaaagaaaccgactgggctagaggccgtaaaacgggataaatggctttatcttctgcttgttcccggtgttttatattttctcatatttaaatattggccgatgtggggcgtattaatcgccttcaaggattattcgccttatctcggattttggcagagcgaatgggtcggattcgagtattttaaagatttctttatgaatcctgacttcttccgtctgctccgaaacacgcttatgctggccgctctcgatttgatctttgcatttccggccccgctcattgtcgctcttttactgaatgaactgcggcacgccatctataaacggtgcattcagacgtttatatatgttccgcatttcgtctcatggacgatcgtcgtcagcataacgtttgtctttttcacggttgatacgggcgtgatgaataaagtgctgcaaagcataacgggccgagagattgcgtttctctcagatcccgaatggttcaggccgatgattgtgctgcaaagcatatggaaggagacgggctggggaacgatcctgtttctggcggcgctcgcttcggttgaccaagagcagtatgaagcggcagtgatggacggtgcaggaaggttgaggagaatgtggcacattacccttccggccatcagaagcacgatcgtcgtgcttctcatcttaagaatcggcagctttttgaacatcggcttcgaacagatttttttaatgaccaattccttaaaccggagcgtagctgaaatcttcgacacatatgtctatgttgtcggaatcacgcagggcgcatacagctacagtacggcagtcggtcttttcaaatcggttgtcgggatcatcctgatattctgcgccaactatatcgcgaaaaagtttgaccaggacggtctgttttaatgaatggaggtgaaagggatgtccggtgcggaaacgatccataacacaaaagcgggccgggtgttcgattggtttaatgtgatctttctcggctgctgcggactgataaccgtcttgccttttctgtatattatcgcggggtcatttgcgacggaggccgagctggcggaaaggagcttctttatctttcccgagacgttctcgcttgacgcgtaccgctatattttttcaacgccgacatttatcaggagcatgggggtgtctgtgcttataacggtcgtgggaacgatcgtccagctcttttttacatttacgatggcctatcctcttgcaaaacggcacatcaagggaaggaatctgcttttgaatctcgtcatttttgcgatgcttttcagcggaggaatgattccgacgtatatcgtcgtcaaatcactgggactgctcgattcctattgggcgctgattttgccgatggcgatcaacccgttcaatctcattattattaaaaacttttttcagcagcttccgaaagagcttgaggagtcggccaagattgacggctgttcagaaatcggcgtgttcttaaggatcgcactgccgctgtctaagccgattattgcgacttttgcgctgttttatgcggtcggcatttggaacgactttttccatgctttgctgtacatcaatgacagtgcgaaatggccgctgcaaatggtgctgcgccaagtgacgattctttcggatctgacggggacgacgaatgatatgatggaaacggtgccgcctgaacaatcgatcaaactggccgtcatcgtcattgcgacgcttccgattttagccgtgtacccgtttttgcagaagcattttgccaaaggcattctgatcgggtctgtgaagggataaaaaaaaaccgccgggctcatgtgccggcggcttcggctcaggcagctgagccgtttttatttctttttttcatccaaaaataaaccgggagaccgacgagaccgatcaagatcgaccacaggcagctgtagaagtctgtgatgagcgtgctgacaaggacaaacaatgacccgagaatcgccgctacaggcaggtaaggatagagcggcacgctgtaagatcttccttggccgttcttccgtctccgcaaaataaataccgcgaaaaacgccatgacatagaagatgtaaatcataaaaatcgaaacctctgacagcttttcaggattgctgatgatcattaaaatgacagcgataatcatctggacgatgactgcgatccaaggcgtatggaatgccggatgaacatgcgagatccagcgggagaaaggcagctgttttttctcagccatcgcaaagatcacgcgcggaaaagacagaacctttccgtttaagcagccgaagatgctgacgataattccgatggatatcagcttgccgccgagcggcccgaacagcatggtcgcggctgtgcttgtcgcattttcgccgagcttgacaatctgatcggcaggaagaatgtgaagcagcgccaagttaatgaacagatagcaggcagtgacgatcagtatgccgcctgtcatcgctttcggaagcactttttccggattcttcatttctccgccgagtgctgcaagaaggatccagccgtcatacgcgaatagcgtcgccaataccgccgccccgaagttttggctggcgatgctctccgtgaccgaactgaaaatatattcatcgccctgccatagaccgaacacaatgatacatacaatgggaatcagctttccgatcgttgtgatcgtctgaaccgctccgccgtattttgttccgacgatgttgacgatgcataaaaaggcgacggtgatgatgccgatgagtgcagtccaggatttatcccaggaaaacaagttggccacaagcgagccgaaatataatccaagtgcgccgatgatggccggtccgtagatgatgatctgcacccagccgcataagaagccccagaactcgccgtaaatttcttcaagatatgtgtaaagaccgcctgttttcggaatctgtgcgcccagttcagcgatggtcagcccgccggcaagcgtcaagattccgccgagaagccaggcgaaaagagcgatttgtgcgtttccggaataggaaagcacgctgccgggcttcataaacacgccggaaccgatgatcgttccaatcacaagagatagcgcaaataacaagcctatctctttttttagtccgtttgcttctgcattcattgctatgcctcccattgatgtgatctctttcatagaaaactatttttatattgtaataccttttttaaaaaagaaaaattaaataaattttctgattttcgtatttcttgtatatgttaaacatttcaaggtcgtaaaccccgggataaccatcaataaccgaactttaatatatgatttttgatatattgttagtttttataggagagggagggaggcccgaccgggaagacggtttggttgacttttcaaatcaaatcgcctattttggagaaagaataaatctcgaattcgagatatttaattgggagatgatagaatgaacgtaaatggcattcaccacgtatctgctttaacagcaaacgcccagcataacctggatttctatgtcaaagggcttggcatgaaactgataaagaaatcggtcaatcaggacgatccgaccatgtaccacttgttttacggggatgaagtcgcgtctccgggttcggatttgacatttttcgagattccgatgcttgcccggagacgggaagggacgaactgtatttcggccgtatcacttcgggttcccggtgaacaagcactcgaattttgggagaagcggcttcatgagctcggcacagagatttgcggcatcgagacgcgtgcggggcggagcattctccgctttttagatcatgaaggacagaacatgatgtttgtagctgatgaaaagggaaaagaccatggagtgcctgtgaaaaacggcgtcattcctgaggatgctgcaatcagggggctcggcccggtcgaactgactgtcagggacgccggtccgacggcggcggtgctgaccgatattctcggctttcataaaatcggtgaggaacaggctgacgaatccggccaaacgcttcacatatttgaatcgggtgaaggaggagcaggcacggaggtgcatgtgaaacagtcagatgacggcagaagagagcgtcccggaagaggaagcgtccatcatgtcgctttccgcgtcaaagatgaagaagaacttaagcagtggcatgagataatcagtgagaacggcttttcgaattcagggattgtggaacgctattattttaaggcgctgtatttcagagaaccgaacggcatactttttgaactgtcgactgacggtcctggctttgccgttgatgaatcaattgatgagctcggccaaagccttgcccttccgccgtatctcgagcatcggcggaaagagattgaagcgcggctgaaaccgatccgataaaaaaacgaggtcccgaaaaggacctcgttttttatataggctctgttaaacgtaaatgttgatatttgataactttccataatattggtataatcagatgagaacaaacattcgatgagaggctatcaaggtgagcgaagcgtttgcaacttgttaaagtatatcggcaaattaccacgagctgaaaaagaacaagtgtaccaatgggttaaacgctatgctgaaccttcttccattgttggtgttcgattataacagagacatatgacagtttgcgactcgcaaaaatgaatgtgcagtcctaattcaaccattcagtaggattgttagaaagcgctgaatagaaatttataaaatgttgggttattaaaaatgaaaagtgaggtttgtatatgaatactgtcagccaagaaatccaagatttgtccattaaatctttggaatcaacttttaataaactaacaaatgcttataaaagcacgacagaaaaaggttcaaacacaactcttgtcaaaaagagactaaacgcagtgaaaattggtttagaaagcctaaaaggtacttggtatggagaagatttcggctataacgaagaaatcatattgactactaaaaaagttttaaaaggtatcattccatctattgaaaaacaaatagcaaaagcaaaagaaggcagtcctcaaaaaacattaaatgagcgtcgcctgactgcactaaaactggcaatcgaatctttggagaaccgtcttatataagacggttcttaaattgtttcagaatcgtgtgagttacataacaagattgaaggaaaccgtttttactacggcttccctttatttttgcgtatttaacaacatccaaatctaacagagtctttatataaaaggcatccggcacagccggcggccccgtaaaggggggcatgctgttaagatgatgcggattctttctggtcaagggtgatttgttttgtcatggttttgccgtttcgaatgagggtaacctttaccgtatccccgatttttgcatcgttgtaaagaaggttgcgcagcgcgcttcctgtatcggtttcttttccgttaaagctgacgatgacatcgttctctttaaggcccgctttttcagctggggagcctgaagcgacctggcggatgtagacgcctttgtttaactggctgccgcttaatccgagggtgcctgtttgatagttttccggcacctgctcaagatccatcatgccgattccgatgaacgggcgctcaatttttcctttagacatcagctcttctgcaatcggtttgacatcattgcttggaatcgcaaatccgatgccttctactccgctttcactgattttcatgctgttgatgccgatcacttcaccctttgtattcaaaagggcgcctccgctgttgccggggttgatggccgcgtcggtttgaatgacgttcatctcggtttggcctgcggatgtatctacggaaacggtccgatcaacaccgctgatgatgccttgtgtcaccgtgcgggacagatctttgccgagcgggtttccaatagcgatcaccgattcgcctgctttcaagcttgacgaatcgccgaaagaggcgactttttccacgtgatcagcggaaatttcaacaacggcaaggtctgtcaacgaatcgctgcccagcaatttaccttccacttctttgccgttggacagggaaaccgtcagtttagacgcgccttcgacaacgtggttatttgtaataatgtatgctttgccgtttgcttttttatagatgacacctgagcctgtgcctgtttcttgttcgcttgagctgctgctgttgctttcaaaaccgaacataccgctctctgtttgtttttgatagtttgaaataccgacgatggcgggagatacattttcaaccattgtagaaatgtcggacgaattggtgctggacaatttttcggtattcgctttagtggaagaagccgatgagttcgacgtctcgtttgtttgcgtctggacggatgtattggccgtttcgtctttgctatgctggtatgtcgtgacgccgagaacgaggcttcctccgatgatgccgctgagaatcggcgtcatccacgagagtctccgcttttgctgttctgctttttttatcgcctggtcgggcttttgatcggagacgatgagttcgttttttgtttcaagctgatcttctctattatattccatcattttcacgctcctattgctatcatatcctttgatgccttaatcataaacaaagactgtgggataaacatgaaaacattgtgggaaattgtcaaagaaaaaggatagaatatatagggtgctatttataatatgacatgtcagaggtgttctaaacgttgaacaagattggatttatcggatacggaagcatggcccggatgattgcggtgaaactgctagatcaggggaaaatcagggatgacatggtggtcgtcagctcaaggaatgacgggaaaacagaggagctgaaaaagctttatccgaatgtcgcctgtcaatcagctgatgagctcgccaaacagtgcggcctgatcttcatctgtgtaccgccgatggcggtaaaagaaacgcttgaaaaaatacagccgtttcttcaggaggatgtccacatcgtttcgattgccgcgggggtcgagcttgaccggcttcacgactggacaagcggacaggtgacgagatacattccgacactcacatctgaagccgggatcggcgtttcgcttgttgtccacggcgagcgggtcgctgaggcggacaaaagccggctggaagaatatctttccgccttcagcacagtcaaacagatcaatgagagagatattgacgctgcgagcaatttaacaagctcttcaccggggttcatcgcttcgatttttgaagaatttgctcaagccgccgtcagaaacagcagcctcacgaaagaagaagcgtttcaatttctgattcattcattgctgggaacaggcaagctgttaatggaaaaagacatgacgtttgctcaaacgcttgatcgggtggcgacaaaaggcggcataaccgcagaaggtgcggaagtcattcaagatgccatgccggaagtctttgacgagctgtttgccagaacgatgaagaaatatgaagtcatcaaagacgctgtccgccggcagtgaaccgcggcattcatcgacatatccggatatccgcaagctgcctgaccaggcagcttttttatttgcattcgacaacattcatcaaaattccaattttatattaaatttctaaaattaccaattgttattgcatttctattaaaattctaatataatttgttagaatattcccaaaataataaaaaatttgagacgtttttaaggggtggttttttgtgaagctgtatatgtctgttgatatggaggggatttccgggcttccggatgatacgttcgtcgattcaagcaagccgaactatgagagaggccggaagatcatgacggacgaggccaatcatgtgattgacgaagcgttcaaaaatggatgcagagaggtgattgttaatgacagccactctaaaatgaacaacctgttaattgagaggctccatcctgaagcgcggcttatttcgggagatgtcaagccgttttcgatggttcaggggcttgatgatacatacgacggagccgtgttcgtcggctaccatgcgagagcgtcgatgagaggcgtgatgtcgcacagcatgattttcggcgtcagacatttttacatcaacgatcaggcggtcggcgagctggggttcaacgcctatgttgccggttattacggcgtcccggtcatcatggctgccggtgacagcgaggcggcagctgaggcggaggagctgattccgaacgtaacgacagcagccgtcaaagaaacggtctcccgttcggcggtcaaatgtctgacgccggagaaagcggggcggctattaagagaacggatggcatatgcgattcaaaaccgcggtcaagtcaagccgctcacacctccggacaggccggtgctgcggatagaatttgccaattacggccaagccgagtgggccagtctgatgccgggtgctgaaatcgaaccgcaaacgacgactgtccgctatcaagcgaaagacattcttgaagcctatcaagcgatgcttgtcatgaccgagcttgcgatgagaacgacattctcctaggaaggtgggatgaaaatggcgggttacatcatgaagcggctgctgtggatgctggcaaccattttggtgatcacgacattgacctttgtgatgatgaaagtgattccgggctctcccttcaatgaagaaagaaatacgaacgaagcggttcagcgcaaccttgaggcttactatcagctggatgagcctctctttgttcaatatttgtactatgtaaagtcgatcgttacctttgatttcgggccgtcgatcaagcagccttcgcaaagcgtgaacgacttgctgtcaagaggatttcccgtttcgtttgagctggggatgacggcgcttattgtggcggtcatttccggaatcgcactcggaatctttgctgcgctgcggcaaaacggcatcatcgactatatagcgatgaccattgccgtactcggcatttcggttcccaactttattatggcaaccttgctgatacagcaatttgccgttaattggaacatattccctccgtcgacatggacgagcccgcttcatatggtgcttccgactgcggctttggcgatggggccgctggcgattatcgcaaggctgacccgatccagcatgatcgaagtgctgacgcaggattatatccgaacagcccgggctaaagggctttccccttttaaaattgtcatgaagcacgccctgaaaaacgcccttatgcctgttgtaacgattctcgggacgcttaccgctgcgattttaacggggagcttcgtcatcgaaaaaatctttgcgattccgggcatgggaaaatattttgttgaaagcatcaactcccgcgattaccccgtgattatgggcaccaccgttttttacagcatcatcctcatcatcatgttgtttctcgttgacatggcctacggaatactggatccgcgtattaaactgcataagaaagggtgagcttatgagccttccagtccgcacagaaaaagaagcgtcttcaggcagtgatatccctgttgaatggtttgccccgctgaaacagaagcaggatgagcgtgaatccgtcgcaaggccgagtctgtcatattggcagaacgcctggcggattttaaggaaaaacaagctggcgatggcgggattgggcgtgttaatcttcctgttcttcatggctgctctcggaccggttctttctccgcacagcgtcacccagcagacgctatccgagcaaaacctgcctccgtcgacggagcattggttcggaactgatgagctcggacgcgatgtgtttacaagaacgtggtacggagcgaggatttctctgtttgtcggtgttatggcggctttgatcgattttgcaatcggcgtcatctacggcggcatcgccggctataaaggcggcaaaacagaccacgccatgatgcgggtcatcgaagtgctgcacggactgccttatttattggtcgtcattcttctcatggtcatgatggggcctggactcgggacgatcctcgtcgcgctgactgtcaccggctgggtcggcatggcgcggatcgtcagggggcaggttttgaaggtgaagcatgatgagcatgttctcgcatccaaaaccttcggagcgaaaacggtaaggatcatcaggcggaatctgcttcctaacatgatgggagcgatcatcgtccagatgaccttgacggtgccgtcggccatttttgccgaggcatttctcagtttcctcggtttgggcattcaagccccgtttgcgagctggggtgtcatggcgaacgacggccttccggtgatcttgtcgggacactggtggcggctgttttttcccgctttctttatttcattaactatgttcgcctttaatgttgttggagacggactgcaggatgcgttagatccgaagctgaggaggtaatgtatttttgcggaaaaaagtattggaagtcgagaatttgcatgtttcatttacgacatacggcggaacggtcaaagccgtccgcggcgtgagctttgagttatatgagggggagacgtttgcgattgtcggcgagtcgggatgcggaaaaagcgtgacatcgcaaagcatcatgcggcttttgccgaagttttcggcaacggtcacagacggtgcgatccgctttaagggaaaagacttgcgccacctgtccgaaaaagagatgagaaagatcagaggagccgaaatctcaatgatcttccaggatccgatgacggccctgaatccgaccttgaccgtcggagaccagctggcagaagcgctgttggaacatcggcccgtgtctaaaacagacgctcgaaaagcagtcatttcgatgcttgagctcgtcgggatcccgaatccgaaagagcgtttgaggcagtatccgcaccaattcagcggagggatgaggcagcggatcgtaatcgccatggcgctcatctgcgaaccggagattttgattgcggatgaaccgacgaccgcgcttgatgtcaccattcaggcgcaaattcttgagctttttaaagacattcagcggaaaaccggggtatccatcattttaatcacccatgatttgggcgtagtcgcacagacggcagacagaatcgccgtgatgtacgcagggaaaatagctgaaacgggagcgaggagggatattttttaccgtccgcagcacccgtatacaaaaggcttgctgcactccgttccgaggcttgaccttgaagatgcagacctcgttccgattgacggaacaccgccggatttgttttctccgcctgaaggatgtccgtttacggcgcgctgttcccgcgcaatggaagtgtgcggcaaaatccatcctgccgttacagaagtctcggcgggtcatcgagtgtgctgctggcttcaggatgaaagggcaaaaagggctctgctgacaacataatcataaaatcgatttttcaaatggggggatttgatgaaaaggctgacgagcgtgttggcttccgcatttgcggtcatcctgctgttcggatgtacggcaaatgaacaggcggggcaggaaacgaagaagaaagcgaaagaaacggctggagaacaggttctgaggctgaacaacgaaaatgaaccgacatcttttgatccgccgatcggctttaataatgtctcatggcaggcgctgaacaatctgatggaaggtttgacaagacttggcgcagaccatgagcccgaagcggcgtccgccgaaaagtggaacatttccgacgacgggaagacatatacttttacaatccgtgatgatgccaaatggtcaaacggagaccctttaaccgccggggattttgaatatgcgtggaagcgtctgctcgatccgaaaacgggctcctctgccgcgtttttaggctactttatcgaaggcggtgaggcctttaacagcggaaaaggttcaaaagatgatgtcaaagtcaaagcggtggatgaaaagacgcttaaggtgacgcttgaaagtccgcagcagtcgtttttaagcattgtagccaatccggcctttttcccggttcctcagaaaatcgccgaagacaatccgaaatggcatgaagaagcagccacattcgtcggcaacggtccgtttaagctggcagaatggaagcacgatgaaagctttacgatggtaaagagcgatacgtattgggaccgggatactgtgaagcttgataaagtgacatgggcgatggtcgatgaccgaaataccgactaccaaatgttcgagtcgaatgaacttgatacggcttatgtcccggctgaaatgagcgagaagctgatgggctctgatgaggtgaaggtgtttgatcaggcgggtctttatttttacaggttcaatgtcaataaagagccgttccagaatgaaaaaatcagaaaagcgtttgcgatggccgtcgatcagcaggaaatcgtcgattacgtcacgaaaaacggtgaaaaaccggcacgcggatttgtgtctccgggaatcaaagggccgaacggcaaggattttcgcgaggaaggcggcgatttgctcaaatataacgccgatgaagcgaaacagctgctcgaaaaaggcatgaaggaggaaaactacgaaaagctgcccgccgttaccttgacatacagcacaaaaccggagcataaaaaaatggcggaagcggttcagcaaaaactgaaaagtacgctcggcgtcgatgtgaagctcgccaatatggaatggaacacattccttgaagaacagaaggcgctcaagttccagttttcccaaagctcttttctggctgattatgcggatcctatcaacttcctggaaagctttcaaacgggtaacgcaatgaacagaaccggctggggcaattcagagtatgacgagctgatcaaggcggcgaaaaatgaagctgatgaagaaaagcgcactgagctgctgcatcaggctgaagaactgctgtttgaagggatgccgatcataccgatccacttctataatcaagtccatttggaaaaggagaatgtgaaaggcatcgtccgtcatcctgtcggctacattgaactgaaatgggccgaaaaaacgtcatgaccaaaattgtccgtctgctattttctttgtgcatactgccgcacaggagcggacggacttttcataaagggggatgtctctgttgaatattgcgcctcaaagattaatgaagggagatacggttggtgtgattgcgccggccagtccgcccgttcctgaaaagcttgaccgggccgtccggtttttaaaagagcttggacttgaagtcaaagtgggacgctcagccgccgaaagacacggctatttggcggggagcgatgaagagcgtctgggggatctgcacgacatgtttgaagaccgttcggttaaggctgtcatctgtgcctgcggaggttacggaacggcacggattgccgggaaaattgactaccggctcatcaaaagccgcccgaaaattttttggggctattcagatatcacttttttacatacagcgatcaggcaaaataccggacttattacatttcacggaccgatgctcagttctgacatcggcaaagatgacgtgcatccgcttacccgccgctcctttcagcagctgtttcaaaaaatgacgctctcttatacagaggaactgtcgcctttggaaacgctcgtacacggcgcggcggaaggggagctcgtcggcggaaacctcgctcttctggtgacgacgctcggtacgccttatgaaattgatacgaaaggaaagcttttgtttatcgaggatgtcgatgaagagccttatcgaatcgaccggatgctgaatcaattaaaaatggccgggaaattatcggacgccgccggcatcctgctgtgcgattttcataactgcatcccgaaaaaacgcgataagtcgctcacattaaaagaggttttccaagattatatcgcctctgaaggaaaaccggcgctgtccggctttaaaatcggccattgttcaccgaatatcgccgtaccggtaggggtgaaagccgtccttgacgccggcaaaaaacggctcaccatcgaaccgggaatttcttaatgggaaaggaggccgccatgaagattgccgagattacgacaaaccgcatcgccgttccgctgaaaaaaccttttaaaacagcgcttcgaaccgtccgcaccgcagaagccgtcattgtcaaagtaacggctgaaaacgggatgacaggctggggagaagcgcctccgactgctgttattaccggtgagacgcttgacagtattgagggggcagtcaacacgattctcgcacccgccctcaccgggtgcaacttgcgaatggctgaggcgatatttcatgatatcgacaagctgattgttggaaatacaagcgcaaaggccgctgtagaaacagccgtctacgattgcttggcgcagctttgcggtcttcccctgtatcaattgctgggcggatacagacgggagatcgagacggattttaccgtcagcgtcaatgacccggaagaaatggggaaagacgcggcccgctatgtacaggaagggtttcgcacgctcaaaattaaggttggaaaaaacgacatggcaacagacctcgaacggatcagggaaatccgcaaacaagcgggtcccgctgtccgaatccgcgtggacgccaatcaaggctggacggcgaaacaggcggtcaaagccattcggaaaatggaggatgaggggctttcgatcgagcttgtcgaacagccggtccaccggctcgatctcgaaggcttgaaacaggtgacagatgccgtcgatacgccgattatggcggacgaaagcgtgtttaccccaagggatgcttttcacgtgctgaaaacgagaagcgccgatctcatcaatattaaactgatgaaggcaggcggcatccgccaggcgctgaaaatcaacgccatggcagaagcgtgcggagtggaatgcatggccggaagcatgatcgagacaaggctcggcatcacagcggccgtccacttcgcagcaagccagaaaaatgtgacaaaattcgattttgatgcgccgctcatgctgaaggaggatatcgttgaaggcggcatccgctatcatgcaggaacgatcacgataccggatgctcccggactcggaatcacgaaagtctgccatgaggggggagaggacaaatgagcctttatacgacagcagtctcagtcgccaatgtctggaccagtccggaagcgccgcgcacaattgaccggatgatgctgtcaaaccctgtacatgtgagaagctggcttgacgaattgtcctacgaggagcgccttgagctatgtacggcaaaccttgttcaaacgcaagtgcttttcggcgaagatgtccaacttataaaggagcggggagactgggcgttcgtcatcattccgggacagccgtctgcaaaagacaaacgcggctacccgggctggattccaaaggactgcctggtcgaaaaaagcccggcgaagtctgagacaagcgccgttattcaaaaaccgacggctttcttatatgatgacaagaaaacgaaagttattgagctgagctttctcaccaagctgcccgtcttgtcttccggcggcgtctggtttgaggtcgatacaccgcttggccgcaaatggctgaaaaaagaagatgcggatctcgaaacacctgtaaaaggcagcggagacgatatcgttcaaaccggtcaggcgtttttgaacctgccctatctttggggagggatgagcgggtttggctacgactgctcaggatttgtcttcaatatgctgaaggcgaacggctgctccgcgccgcgcgatgccggcgaccaggcgaaaggcggaaaagaggtatccttcagcagcccgaagcggggcgatttactgtttttcgcatatgaagaaggcagaggacgggttcaccacgtcggcatttactgcggaaacggagagatgcttcactctccaaaaacgggcaaatcgatcgaggtcatatctcttaaaggtacaatttatgaaaaagagctgtgtgccatcaggcgctatttttaaataaaacggggggattggcatgcaaaccggcgctttattgaaagtcagccgtctgaaaatgcactttgacgccggaaggggcaaaacggtcaaagcggtcgacggcatttcatttgatattaaagaaggagagacgttcgggctcgtcggagaatcgggctgcggcaagtcgacatccggaagagtgctgatgcgtctttatcagccgacagaaggcgaggttacatatcgggggaaaaacatccaccatttgagcgatgatgaatcattccagtacaaccgcaaaattcaaatgatttttcaagacccgtatgcttcattaaatccgaggttaaccgtcagggagattatgacagaacctatggaaatccacggcctctacggagggaaaaaggcgcgtcttgaaaaggcggacgagcttctggaagcagtcggtctgcacaaaagctttgccaatcgctatcctcatgaattcagcggcggacagaggcaaagaatcggcatcgccagagcgcttgcgcttgaacctgaattcatcgtcgccgatgagccgatatcggcacttgacgtctccgtgcaagcgcaggtcgtcaaccttttaaaaaagctgcaaaaggaaaaagggctcacgtttttatttatcgcccacgatctttccatggtgaagcacatcagcgaccggatcggcgtcatgtatctcgggcacatggtcgagatcaccgacagcggccggctttatcaagaacctctgcatccttacacccaggcgcttttatcagctatcccgattcccgatccggatgtggaagacaagcggagacgaatcatactgaaaggcgagctgccaagtccgatcgatccgccgagcggctgcgttttcagaacgaggtgtcctgccgcgatggacatttgcgccgccaaaaagccgatgttaaaagaagccgacgacggtcattttgtcgcctgccatctgtatgacggagacgcaaggaaagaggaggccggcttgaaggtgacgctgcaggcgaggtgattatagaaaaaaggagccctatttacagggctcctcagcgtgccggcagcttttccacatttgttaagtcgccgattcgaaatggaataaggatcaggcgccgcctttgtaacattcagtggaagtacgctcaatcggcagagtacagcatctgaatgatccgcctgattttatgatctcggataagtcgatttcgatgaccgtatagcccctttttctgagctcctgattcacgtggcggttaacaggcaggctgatcacggttttattgccgatggacagaacgtttgtaccgagttggaactgttcatcatccgtaatttcgatcatctcatagcgctttttcaagacgtcgtattctctttctcctaaggcttttggatagacaagcgcttctgtcggcgaaagaatgttgaagacgcaatccagatgaaggaacgtttcttcaaacggaaccggtatgacttcataagagggaagcctgcgcttcagctcttggacggccgagaacgtcgttctgtggctgatgccggcatatatggtattttggtcgacgaggatgtcgccgccttcgatttgatagccttcattaaatgcggtccaggagatttgttcttttgccagccattcctgcaggacattttcttcgccctggcggatgtcggctgaaagctgcgcggaaaacacagtgcctccgatcgtaaacccgatatcgcgcgtgaaaacctgttccggaaattggcttaaagcaggcagaatcacgacttcaataccccggctctccaattcttttatcaatgtattatgctggcggacggccagcgttttatcgatattatccttttgaaaatacttctgtgtttcattgatcacttctgcaatctccatatactccggtctgcataacaccactttttttaagacgtcgtattcgcttgtacagcccgccccgcggttttttttcgataatgctgagtccattttgattcccccgtcctctctttagtcatttcattattccctacccgcagcgggaaataaaccttttagccagaaaatctgacagtcagccggataaaaaagtttagacaaatgaattctaatagtgtttaatatagaaaaaatccactttacaaacgcatcttagtagacatcaaaggagtaatggatgatgaatggacctgaaaagagatactgcaaagattcaaaagttgtcaaaacaagcagggtatttccgcttgatacgaacaatcacaacaccttgttcggcggcaagctgatgagctatatcgacgatatcgcttcgatttcggcagcgagacactcgaggtgtgaaaccgtgacagcttcaatggattccgtcgattttctcgaaccgatccgccaggaggattcagtctgccttgaatcttatgtgacatgggtcggcagaacgtcaatggaggtattcgtcaaagtcattaaagagcatttgctgacaggcgaacgaaagcttgcggcgacatcctttttaacctttgtggcgcttgatcaggacggcaatcctcaggccgttccccaagttgtaccgcagtctgaagaagaaatcatgctgcacgagaccgcccggcagcgcgccgaagaacggaaaaaccatcgcaaacacagcaaagcgctggcccaggcgctggctgttgacaaaccttggtaaacatacgaacaaaaccccggctcaagcatcagtttgccggggttttgctgtgcaatgaatacactacccaatatttgttcaaaataaattacaaaaaacggaaagaagttttgggtgaaatgcttgaatttgtatggacttttttagccaagccagctttagtgttctctatagcttatattcttttccgaatcgcagggaagaaagccgtttcgcaaatgacgaacttcgaccttttgctgacatttgcgattggaacgatcatcagcgaaccgattcttacttctaaaatttcaatgtccatttattacgcgcttacctttctgatcttctatttgttgattgaaaagctgtcattacacaataaatggcgatggtttcttgtcgtcagtccgaccgtgctgatccgaaacggcaatattgataaaggaggattaaaaagagagcggctgactgtcaatgaactgctcggcaaattgcgcgaaaaaggctatgccgacccaaaagatatcgacctcgccctgattgaagaatcgggccagatcagcgtgattcccaaatcggaagcaaggcctgtacagccgcgggacctcaacttggagacgaagcggaatttcgtgccgattccgctcattttagacggcgaaattatcgaacacaatttaaaatacttgaaaaaaacgaaagaatggctgtttcaaaaattagaggataaagggattgagcaagcgatgctgccaaccattacgctcggcaccttgaacgaaaaaaatgaaattataattgatacggaagatcccggcagcccgttaacccatgacccgtatctctataaaccggggcaagaccattaattttcgccgaataggcgatttttttatttcctgctatttcagaaaaatattaagagtctgtttttttattcgttgataaaaatgaacagggcatttgtcataaaatttgaaaatggtgtcacaaaaaacaggaggaaaatatgttgttttctgtatttttatagcatatattagtttttgtgaaaaaattttgatgataggtgcaattgatgaaaaggttttttagtgtaataattttgggcgccctgctgctgctcgggacatctgcgccaatcgaagcggcagactacggacgcgacgtcctcggctcaaaagacggctggggcgcttatggaaaaggaacgaccggaggcgctgacgcttcttctgatcaggtatatacggtcaaaaaccgcaagcagcttgttgaggcattagggggagacaataaaaagaacagcgaaaatgatacgccgaagatcatctatgtgaagggaacaatcaatcttagtgttgatgatgacaacaatcctttaggctatgaagattataaagaccccgaatattcgatcgaagcgtatctcaaagcttatgatccgaagaaatgggggaaaaaggagccgacaggaaagcttgaagaggcaaggctccgctcgaaagataatcaaaaggaacgggtcttgatcagagtcggttcgaacacaacgattatcgggctcggagatgatgcgaaaatcgtcggcggaggcctttatgtcaaaaacgcggaaaacgtcattatccgcaatatcgaattcgaaaacgcgtacgatttcttccctggctgggatccgacggatgggagcagcggtaactggaattcagaatatgacaacctgctgatcgaaatgtccaaaaatatttggatcgaccactgctcattcaatgacggagatcagcctgatgagctgactgaaacgcatttcgggcgcgaattccagcatcacgacggactgcttgatatcaaaaagcagtcggatttcattacggtgtcatacagcatattttcaggacattctaaaaacacgattatcggatcaagcgacagctacaaagcagacaacgggcatttaagggtgacattccaccacaatctctacgaaaatataaaagagcgggcaccgcgcgtccgctacggaaaagtgcacatttacaacaactattttaaaagcacgaaagacagctacaattattcatggggcgtaggctattcttcaaaaatttatgctgaggacaactactttgacctgccggaaggaacgaagcctcaaaaactgatgaaggtctttaaaggtgacgctttatatgaaaaagatacgatcgtaaacaaccaaaaaagcgtcgcaaaaattgatgttgtcagcacatacaacaaagcaaacaatgcgtctattaaaaaatcggccggctggaagccgacgctgtttgaaaaaatcgacgacgcagaagatgtgccggcaatcgttgaagcgcacgcaggcgcaggaaaactgaagtaatcaagcaaagcggacatgcagatgatgtccgcttttttgttcaggtatcttgcaatgcaaaatagtgtatgttatcattcgtgtatcttgtattgcaagatacataaaagaggtggcttatgagttcaacgcaaatgctgaaagggattttagaaggatgtctgcttgccgttatatcagaaggggagatatacggctatgaaatgacaaaggtgcttgcgggatacggtttttcggatatcagcgaaggaagcatctatccgattctcctccgcatgcaaaaggaaaaatgggtggagaccgaactaaaacggtcggcgagcggcccgaagagaaaatattacagacttacaccccttggagaagcggagcttcaatcgttcatcgaccgttggaaagcattatccgggaacgtcaatgcactgctcgaaaaaaaactgaaggagaagtgaaactgtgctatcaaaggacatgcaaaacgtattggacgagatgagaatctacttaatgtcttcaggaaaaagcgacaaagaaatcgaaggaatcatgaatgagctaaccgttcatgcctgggaaggagaaaaggacggaaaaaccgtccggcaaatttttggggattctcccaagtcatatgttcaagcgctgtcaaaagagctttcatcaaggccaggggagatcgccaagttgttctttgccattttaatcggcgcaatatcctattttatattcagcgacgccgtgaacgacagcctcgattattctgtctatacgctggcaggctatccgctttatattttgctggcagcggctatgttgccgcttttgggccggattacagcatttaaagggaagaatacggccttcatgtatacgatggtgtacgccgctttgacgttttttccgattttggccattatttttattgaccggcaattcgggacaccggttttttcgtttgatgggggaagccgctggctgattatggccctgtcgtttcttgtgatcgtatgtttgtctttcaggttgaaagccggagccttgtccatattgccgctgcttttagccggaacgcattttttgtttcagtatatgaactgggattcagcaggagccatgatggcagaaacttatattccctatatcgggctgcttctcgtcatgtttattgaaacaaagcgtgccagaaatacggctcaatatgaatgaaatacagaagagcattatattttttaaggtgaagactcttgccttttggcgatcacaacgtttatgatcagagcatgaaaggtggccgatatatggatatgatgtggggctatgtactcgtctttattttggctgcgattccgtggtttgaagtgatcggtgtcgttccgctagcgatcattgccgggcttaaacctgttccgtccgctattatcgcgctattcggaaatctattaaccgtactgctgcttatttttttaattgacaaagtgaaggtatggctagaaagaagacgcggggagcggagagcggagacggataagttctcaaaaaggaaaagcagggcgaaaaaaatatggctgacctacggcattccgggcctttctttcgtcgggcctttctttatcggctcccacttaaccgcgtttatgtgcatgggctttggggccaagcgcagacaaacggcgctgtggatgacggggagtctcgcagtatggacaacggcgtcggctgtcgctgcctactatggtttcagtttcctcgctcctgaaaatgaagggctgctgaaaaatatctttaaacaggaggagtgaagatatgccgtttttgaaagatttatctccagatgaagagatggcgccgacagtcgggctgcttttttcggcggtcaatgaaaacatcgaacggctgaaatcaatcgtctccggcatcagccgggaagagctggaatataagggtgagcatggcgacaaaaacagcatcgcccagctgatctatcatttaatcaatgtcgatgtccgctgggtttacaggctgaaggaaagcgaaattccaagagagctggaagagaaatacggaccgatgacggatgaaaacggacgtttgccggaggtgacaggcgtccctttgaccgtgttaatcgagtggcatgaagaggtgctggagatgttgaaacacaccgctaaaggcttttcggaaaaagacttgctgaagaaggttccgtatgagggagggttttcgacgatccgctgggggatctggcatatgtctgatcataaccgctatcaccaggcgcatattcaggcttgcttaaaagagttccgcatgcaaaacagttgattttttcgtatgatttggtatgatgctaattagcaaacttcataacgttaaagttttctagggttccgcacattcgtatgtggcctggtccgagagaaaacacatatgatttgttcatatgcacacggagggataaaagcccgggagtatcgtttccatcgatagcccgggttttttcttttgctgaaaatgaaattggagggattgtgatgagatggggcagtgtcatacttgcagccttgtttgaaattggctgggtcatggggctgaaacacgccgattcggcacttgaatggatctgcacggcggccgccgtcgtgatgagcttctatatactggtgaaagcgggggagaagctgccggtcggaaccgtgtatgccgtatttaccggtctcgggacggcgggaacggtcgtctgcgaaatcgccttgttcaatgagccggcaaatatcgccaagcttgctctgatcggtgttttgctatgcggcgtgatcggtttgaagcttgtaacaaatgaagagaaaggggaggcgtcataatggaatggatctgcctcatcgccgccggtatactggaaatgctcggcgtgacgatgatgaaccagtttcataaagacaagcgggtgagatggatctttttgttgatcatcgggtttgccgcttcttttttcttgctttcccttgcgatggagacgctgccgatgggaaccgcgtacgcagtgtggacagggatcggcacggtcggaggtgcgcttgtcggcatcctgttttacggagagccgaaagacggaaaacgcatctttttcatcgcgctcattttgggatctgccgtcgggctgaaacttattagctagagtcgggttgatgcaaataggcgttcgtaaattgatttttcaataaactccagtataatgaaaagatagtttacgaattacaagcaaagagggtttttacgaaaatgaacgcatatatgaaacagcagttatcgcaatatcaggaaatcaataacgataaggcccgccttctggtcagctgtccggatcagcctggaatcgtcgccgccgtttcttcatttttatttgagaacggtgcgaatattattgaatcgaaccagtatacgacagaccctgaaggaggccggttctttctgcggattgagtttgaagttcaaggcatccgcgaaaagatcgaacagatgaaagcggcattcgcctctgtggcggagtccttccaaatgacgtggagcatgaatttggcgagcgaactgaaacgcgtcgctatcttcgtttcaaaagagcttcactgcctgcatgaactgctatgggaatggcagagcggcaatttgatggcggagattgcagcggttatcagcaatcatgaagatgcaagagaaactgttgaatccctgaatattccgttcctttacatgaaagcgaacaaagacattcgtcaggaagtggaaaaacagcagctgaaatggcttgaagagtatcgtgcggatgtcatcgttctcgcccgatatatgcagattttaacgcctgattttgtctcggctcatccgaacaaaatcataaatattcaccactccttcctgccggcttttatcggggcgaatccgtataaacgggcatatgaaagaggcgttaaactgatcggagcaacatcgcattatgtgacaaacgaattggatgaagggccgatcatcgaacaggatatcgaacgggtcgaccacagagacaatgtggaagcattgaaaaacatcggccgcacgattgagagaagcgttttggcaagagcggtcaaatggcacttggaagaccggattatcgtgcatggaaacaagacgatcgtctttaattaaattgtttgatctgcctcttgacagaggcgtttttcctaggcataataataaaaaatcacgagcgttgaagagggccagtaagcagttctttctgtgaaagagagtgaaatggcatgctgaaacatttcaccacatgaaacctgccgaacctgcctcggagtcccagggggaaaacctgggcgcataccctggcgttaaaggggaaagaggagtgcgctttattttctcgcgcattcaatgaaggtggtaccgcggaaagctcttttcgtccttttttacttggacgaaaagggctttttttattggccttctgccagatcatctcggagggaaaaaacgtgaaaaaacaacggattgtcattaaaatcggaagcagttcattaaccaactcgaagggcagcatcgatgaggagaagatcaatgaccatgttcgggcgatagctgctctgaaaaaagaaggccatgaagtcatcttcatttcgtcgggggctgtcgctgcgggatttttacagctcggctatcccgcaaggcctgtgacgctaaagggaaaacaggctgcagcggccgtcggccagagcttgttaatgcaaacatacatcgagcattttgcagaccacgatatcaagcctgcgcagatcttattgacgagaaacgattttgccaaacgggagcgctatcgaaatgcatatgcgaccgttatggaactgattgaacgggggcttgtcccgattattaatgaaaatgattcggtatctgttgaagaattgacgtttggggacaacgacatgctttccgcccttgtaagcggactgattcatgccgacaaactcatcattttaacggatattaacggcctctatgactcgaatccggctgaacatcccgatgcccgccgttttgattacattcccgaaattacggacgaacttttgggctgcgccgcttccgccggatcaaaagtcgggacgggcgggatgaagtcgaagcttttggcggcaaaaaccgctctttcactcggcgtcaatgttttcataggcgccggagagggagatgataagctgatccagattttaaaaggaaacggggacggcacctatatcggccaatccgacctgtcttccgtcaacaatcataggcagtggatcgcctttcattcacctgtttcagggaagattaccgttgatgaaggggctgagctggcgattaccgaaaacggcgggagcctgctgccggccggcgtaacagcgatatccggagattttccgaaaggggcggttgtcgaagtttacggaccgaacggcttggccgggaaaggccaaacgctgtactccgccgcagagcttgaagaggtaaaagggaagcgaagcgatgagttccatcatgaagaagggatagaagtcatccatcgaaatgattgggtaagcattaaagaataaggggatgaaagaatgagcgaagtgattgaaaaagcaaaaaaggccaaagtcgcaaaggaagaactggttcatcagccgactgaaaggaaaaatgaggcgctttcctttatcgccgaggccatccgctttaagcaggatgagatattggcagaaaacgagaaagatatcgtccgcggcaaagaaaaaggcttttcgcctgcgctgcttgaccgccttgccttaacgccggagaggctgaatgatatagcagacgccgtcatgctgctcacaaagcttgaagaccctgtgggggaaacgcttgaaacgatccgcaaagacaacgggcttttcattgaaaatgtcagggtcccgctcggagtcgtcggaatgatctatgaggctcgtccgaatgtaacggtcgacgccgcaaccctttgtttgaaaacgggaaatgccgtcatcctgcggggcagttcgtcagccatcaacagcaataaagcgctcgtccgcgtgatcagggaagcgctcgaacgctcggcgcttccagaggatgccgttcagctcattgaagatacaagcaaagaaacggcaaaacagctgttcactttaaacgacggcttggatgtgctcatcccgagaggagggaaaaacctcatcgatatggtggtgcgggaatccacagtgcctgtgcttgaaacaggcgcggggaactgccacatattcattgatgaatcggctcagccagacatggctgagcaggttgtaatcaatgccaaaacgcagcgcccttctgtctgcaatgcgattgaaacggtgctcatccataaaggctgggcggaagagcatacgaaagcgcttcttcaaaagcttgaagaagcgggcgttgaaatcaggggagacgaagccgtatgcacgatgctgccttctgcggttccagctcgcgagaccgactggggaaccgagtttcttgcgccggttgtcagcatcaaaaccgttgccggaatcgatgaagccatccggcacatcagacagtacggcacacgtcattcggaagcgattctgactgaaaatcaggaaaacgcccggtatttcttaacgtctgttgacgctgcagctgtttaccacaatgcttcaacacgttttacagacggctttgaattcggctacggcgccgaaatcggcatcagcacgcaaaagcttcacgcacgggggccgatgggccttaaagcgctgacttcttctaaatatatcattaaaggaaacggacaaatccggatatgaaagtgtggcatcctgtctcgaatgaagacaggatgttttttgttgtgttatcacttttaattttataaaattaaattgttcacaatataaattaaaggagacgataaatcatgaaaccgctatttacctcgcaagccactgccaatggtggcagagacggacaagtcacctcatctgaccgcgtccttgagctggagctggccatgccgggaacgccaaaagccaaggaaaacgaaaatgccaccaacccggagcagctgtttgccgccggatacgcggcatgctttgacagcgcattgcaattgaccgcccaaaaggcgcgtcttcgaatggagacagaggtgacggcgaacgtcagccttctgaaagatgaagcagatggaggctataagctcagtgtcacactgcaagtaaaaggaaccggcgttgaacagagggagctcgaaaaactcgtccatcaagctcataccgtttgcccgtattcaaaagcaatttccggaaatgttgatgtcaaccttgaagtgatttcttaaaaaagaggcgccttcagcgtgtcgccaaaccctcgcattcgttgtcaggcctgcgcttcggtgctcacgaacaggagaaggatcggcggctaatgccccaggcgtcctgcctgaacgccgccgtcatcacatcctgtgaaagtcagctccgatgctcggccttcctagactgcaagggttgcgggtcacgctgaaaggacgacaaaaacccaaaactgttttttgttttgggtttttgtcaacaatctgaaggcgcctttttgctgtctttacagcacatctgtttttttcgtcaatgaagcaagaagggattcaagcgtttgcttcaagtttttcagttcgccagccgacagatcggtctgggcgatcatgtgctgcggaatgctgcttgctttttcttggagtgcctggccgcctgctgtcagtctgacaattacagaccgttcatcttcaggtgaccgctctcttgttaaaaggccgtgctgctccattctcttcagcatcggcgtcagtgtgccggaatcgagataaaggagcttgcccattgttttgacgcttaattccccgtgttcccataataaaaggagcgcgaggtactgcggatacgtaatattgagttcatcaagcagaggcttgtaaagcttcgtcatttcacgcgagcttgcataaaggagaaagcaaagctgtctgtcaagcctcatatgttcaaattcgtttgccatcgtttcaccaactcttttttatgttcctttttattgtataagattttgcgttcttttcccattgatcggctgaaaacccgaaaaaacaaaaacggatgtttaaaaaactcattttgtgaaatataaagagtagaggaaaaaacgtaaggaggaatcaggatgactgcattgtttacagcaaaagtcacggcaaaaggcggaagatccggacatgtcaaatcagatgacggggttttggaccataacattgttatgccaaatgaaaaaaaagaaggcgaatcagggacaaatcctgaacagctctttgcggcgggatacgcggcgtgcttcggcggcgcattggaacatgtcgcaaaacaaaaaggcattgacatcgattctgaggtcgaaggccatgtgagcttgctgaaggatgagagtgacggcggttttaaaatcggcgtcaagctgatcgtcacagcaggcggggtagaaaaagaaaaagcgaaagagctggtcgaagccgctcatgacttttgcccttattcaaaagcgacgagaggaaatatcgacgtcaatcttgaagtaaaataaataaacgggaaagatgaaaacgagaaagcaaacaaagcttgtttgctttcttttttagaaaggagcagcatatggcatatcttaaaaaagcgcttgtgttctccgtgctttctctcgctattgtccttgcaggatgcggaaccggagcggcggagaagaacaacggcaatcaatccccggctgatacggccaagcagaaagcacctgatttgaaaacatattcccttgacaaaaatatccggtctgaagaagattttgatttgataggcaagtatgttcatgctgaagatgaccaaatcacgctcgaaataaaggataaggaactgattgttccgaaaagcagccgctttcacagcgaagaagaccatgatgacttaatcgggaagcttgtgaaggtagaggtggatggaaaaacgcaagaagcggaagaagccgagcttatgccgcagtcaaaagccgaccaaaatggcgtatatgaggaggagaaagacggcagccgaaaaatcatcgccacgtttgtcagcgagtcggagcaaaacattacaatcaaaacaaaagcaggggaaaaaacttatcagaaaacagccgattttgagagggatgtcgccgaagcacctgaaaaactgaaagggaaaattgtcaggcttgaaattgaaaaggatggaaaagcagaaagccttgatttggaatcggaagatcaaaagcttgaatggtatgagccgtctgcttcaaaataaaaaaagcttcctgatgaaggaagctttttttaatattccactttttgatcggtcttttcccatgtgagaaaaggttcaagctttgcttgaaggtccattttataaaaaggaattttccgttcgcttttcgttttggtgatttcttcataaataaaagagtcgtcaaaaccggccgatgcggcatccgaatgctgagcggcgaagtaaacttccttcggtctcgcccagtagatggctcccaggcacatggggcacggttcacagcttgtataaagaatgcagtcgttcagctgataatcgccaagtgcttcacaggcgagccgaatagccgttacttccgcgtgcgcggttggatcattgcttgttgtgacattgttttttccctcggcgataatttggccgtctttgactatcacagcgccaaaaggtccgcctgtgccgcttttcacgctctccaccgcaaggtcgatggcgcgctgcaaaaatgcttcatgattcatttctgtatcctccttggttgtcttgccttcttattatagctgatggacccggcaaaataaacacatgtcagaatattcagcatatttgatttcaaaccgcacatcgcatacaatgaatgctagaataatgaacgggggatgatgttttgcttacattgtatattgcaagacacggtcagacggaatggaatattgaaaaaagaatgcaaggctgggaagactccaatttaacggctttgggactggcaaacgcaaatgccctcggcgaacggctgaaagatgttcaattccaagccgcatattccagtccaagcggccgggccgttgattctgcgcgggctatgctgcagaaccgcagcattccctttataacagacgacagattaaaagaaatctcgatcggccgctgggaagggaaaacgtatgatgagatcaaacaaagtgatcctgacttgctggaagcgtattttaatacgcctgaaacatatatgcccgatgaaagcgagagcttttacgattttgaaaggcgggtcagtcaggcgtatcaattcattctccgccgccatcgggaaggcaatgtcctcattgtcagccattccgtgtttatattgatgctcttgaatcttataaaaaagaggccggtcggtgaactatggaactcaagctatgttcatgacacagctcttgcggttgtaacggtttccgaggatggaagcgccgcgattgaaagagaaggagacggtgaacatagagtagaagcaaagaatgccacctggtaggcatgccaaaaagcctgatgttggaatcaggctccgaggctcctagccggaatatattttggcactgaagctgtgaagcgtgtcggcggtaatcgttttgttttttgaaagacaaacggttttgacatctgccgcatctgcttccgctttttttccgaaaagtaagactgtaagagaaagcgggccttttgcgatttgctgatatgccagaatgcaaaggttgtcggcgattgtgcggctgatcatgcggcgcgccgaccacagctgctgctgtccctcttcatcaaactgaatatatgctgcggctcgtttttttgtaatgagtcctgacagaccgttttgtttgatctgcttcatgagagcgagcggttcagacagcggcggtgcggtcagtttatagctgccaggggaacatttggctgcagccaaagaagacatgatcggcaggtagccggccaaatgcccgccgctgtgaaagagcttctccgcaagcatctgatcggtctttttcatgcggatttctgtaaagtgcaggagatgctgcaaatcatcgagcgtgtgtaaaaatcctttgagttcatgttccatttcggattgcgcctgatcgatgccgcatgttcttgctgttttcacgctggagaaaagaacatgaaaatgacggttcaaaaggcgtattaaatcgctgattcgctggtgggaatagcgaaattggcgggcgagggcgtgcagatcattgatgttcagccggatcgtcatatcagctcctcggctttcagctgaagccgttcaatttcttcgtccgcctgctctttaatggtcctcagcttgtcatacacgcgcgattccgcccggtcgagatcgtccaaaagcgcgtcatacatttcgcgcgcctgtccgcgccatccgttgatatacgtttggtgtgcttttaaaatagaagaactttcctgcctcagctcatcaatggcggcattcacatcttttacgtatagctgaagagagtgaatgtcttcctgatatatttttcgcttgatttttcgttctaacgctattccatcgtcaatcactacatattttccttcccttccatcatctactacaaatatgttaaaagaaaaggatacggaaggaaatcgtacgaatgaatcaaaagtcttaatgttttttgggcggacataccttgtataacggttcttttggcctaaaaagggctggagccatgaaaagagccgcccgtgtgaacaggcggcgtttgtagtggattttttgtgaaattaaacagtctgagccagtttgcctcttgcttgtttggctgcttcaaccatattcttaagcgctgcgatcgtttcctctggctgtctcgtttttaaaccgcagtcagggtttacccagaagcgatcagccgggcagactttcagcgcgtcttctatgatcgtgagcatttcatcgctggaagggacgcgagggctgtgaatatcatatacgccaagaccaagccctttcaggtaagggtgctgttccagataatcaagaaatccgccgtggcttctgctgtgctcgatcgtaatgacgtctgcgtcaagatcttcgatcgcgtctacgatatcttcaaagttgctgtagcacatatgcgtatggatttgcgtcgtatcttccacagatgaagtggacagtctgaacgcttctgcagcccatttgagatactcgtcccaatcccgttctttaagcggcaggccttctctcaaggcaggttcatcgacctgaatgatttgaattcctgctttttcaagcgcttcaacctctttgcggagggcgcaggcgatttggaaggcgatctcttttctcggcaggtcatagcgggcaaaggaccagtttaaaatggtaacaggccctgtcagcatgcccttgactttcttcgaggtcaaggattgggcgtaaaccgtttcttttaccgtcatcggctctttaaactcgacatctccgtagatgaccggcggccggacgcagcgggaaccgtatgactgaacccaggcgtatttagtaaaggcgaatcctccgagcttttcgccgaaatactcaaccatgtctgtccgttcgaattctccgtgaacgagaacgtcaagtccgagatcttcctgaatatcaatccatttctttgtttcttcctgaataaatgcttcatactgctcgtcggaccattcttttttccgccatttttgccgcgcgctccgcacatccgccgtctgcgggaagctgccgatcgttgttgtcggcaataggggaagtccgagagagtcattttgaatccgcagcctttcttcaaaagctgtcgggcgtttaaagtcttcctcagtcagcttgcctctttcttcggcaaaggccgaatttgtcgctgcaccgtactgtttgagatcttgaagatgtccgtgcgcttcatcgatttccgcttggatggccgcttttccggaaacaagtccgttcttcagcagtgtaagctccagaagtttctcttttgcgaaagataaaccgttcaagagatcgtcggcaagatgttcgcccgggtgttttgcgacagggacatgaagcaggctgtttgaaggctgaatccagacttcgtcaacacccgctctctggatcagttcaagcgtcaggtcgaggcgctcttcgagattggctttccaaatgttgcgtccgtctaaaatgccggcggcaaggactttgtctttaggaaaaccgtgcgctttcaggtgttcgaagtttttccctttatcatgaacaaaatcaagaccaattcctgcgacaggaaacgatatcagctcttcataagcatcaaccgagtcaaagtaggtttgcagaaggatgttcagttcagagacttcttctgtaatcgtctgatagatttctttgacagcagccgcttcttcaggtgaagccgtcacaagagcaggctcgtcaatttgcacccatttgacgccttcctgctcaagctctttcaaaacctggatgtaaagaggtgtcatttggttataaatatctttaatatcctgttgttcatagccttttgcaagggctacgaaagtgtaaaggccgagtatgacgggcttcgtttctgttcccaatgctgcttttgctctttggtaatcttgaagcggtttgtttctcgtcacgcggtattgtgcacctttttcatattcaggcacaatataatggtagtttgtattaaaccattttgtcatttcactcgatacagcatctttcgtgcctctcgccattgcgaaataagtatctaacggatcgtttatatccttgaatcgatctggaatccagttgaacatcaccgccgtgtcaagaacatggtcgtacattgtaaagtcggaaaccggtatgatatcgatttgctgatcaagctgagtctggagcgctgctaaaaattgttcatccatttctttcaaaaaggtctcgcggtccgtgtttcctttccaataagcctcaagcgattttttccattctctgttcaagccgattcttggaaagcccaagctgctcgtttttacattagtcatgtctggtctcctccttttagtgttcaataaaaaaagacactcacacttcggacaatgagaaggtgaatgcctgaaaacagcatgttgcgaacgagaaataaacgtagcgattgttacgtcaactcgaacacctcctatcgaccgtaggtttatggtgcgtcagaacaggcaggtctcctggctcatgaatcgacggttatttcccccttcccatatagaaacagtgggttttatgaaataacctcctcattcacagtggcgggaccgcgttggattttcaccaaacttcccttttaaaatctaacctcgttagattaccatgttcccggcgatgaaattgtttagtagattatataccgccgcgatcttttagtcaaaataatttttgaattcttgcaattaaaaagattcagctttatacatggccatgaaaaaggccgccgacattgtcggcagcctcctttagactgttaaagggaaagaagttttgcttcgccggctttttccgccagtacctccggcgctgacaaatataagaatccgttgccgatcagcgcttttgagtaatcaagaggaagggtgcggcggattaactgagcatacagttcgggttctgtcagtttccgtttaaacgcctcttcttcagctgacttgatgagagcgagcgcgccgctgacgtgcggtgtagccatcgatgttcccgtcagctttccgtattgatggtcgggcaatgtagagaggatttcttctccaggtgcaacaaggtcaatttctttgttcgcatttgaaaattcggaagactcacgcgtcaatgacacggatccgacggcgatgacttcgttgtatgcagcagggtatgagtactcctctgtacggtcattgccgtcgccttcgtttcctgcggcgcagacgacgagcactccgctcttcacggcgtttgtcaccgcttccttcaactccggaacgtcggcaggaccgccgagcgacattgaaataatgtcggctttttgctcaacggcgtagttgatcccgttgatgatccattcataatccccgctgccgtcttcaccgccgagcaccttgacgattaataggttcgcttcgggtgctacgccggaaatgcctccgttttgatcgtttgcggcaatcgtacccgccacatgggtgccatgtccattataatcatgaaactgatcttcttttccgttgtcatcatcagtgaagtttctgcctccgatgattcggtccgccaaatctggatgggttgcgtcacagcctgtatcaagcactgcgacagtgatatcttttcctttaaaaccttgtgaccacagctccggtgccttaatcgcatcgattccttccggcagttcattcacgtccatcagctttgtgtcagtgacataaggaattaatcgcatttgcatttcaaagccctccctgttatatgctgctttagatgggttacaaggtgcgtgattctattgtaaaacattcactttgttaaaaaaaggttcatttgtatgaattttatgaaaagttaaaaaatatagataatagaggatataagtcgaataattgcgaacaatgctggaattgtaagcgaaaagacctgtgaaatcggtggaagggcgagagagtcactagatatatgagatttcgcttcaacatattatcccggcaaaaggatatcctattaaaaaaaggagtggatacagggtgaaagaacaagaagacgaaaaaagagacgaattatcaatcgagcaggcggagtttgtgccgcatccaaaatatgaaggagaatacgcgcttttactgcacgaaaactatcacctgctgtcaaaggacgaccttgagcaggaaagcgaaaaataagaacggagctcggcacctgggcgaaagagctggtttaattttgacgaaaacgggaatcaacacataatagagagcatgaaagttgcttttcttattgacagttatcctttttttctgtaatctcattgtgtccggtaaatacagctcttcgttaggtgaggctcctgtatggagatacgctgctgcccaaaaatgtccaaagacgccaatgggtcaacagaaatcatcgatctaaggtgatttttaatgcagctggcatgctgcctatgccatacagtgctaaagctctacgatggaaggcgttagggttttattttgtatggcttttaacaccttcatttcgatgaataggtgtttttttattttttgaggaaaatgaactttccgtattaatcaaggaggtggtagtatggattctccccattcgaggcggtttaaacatacgagaaatattttgcagcatcacacattgattgatgaggagatccttatacttcaccccttttgctatggtgatataaggatctcctgaaaagggagggacagattgccatggtaaaaaacatgacatatgatgaactgattttacgcattattattttgctgagagacggaaaacgaaaagagttccaaagcgttttagaagaactgcagccttatgatatggcgattctgtttaaggaaatgcccgaaaagcaccgcggccggtatctgtcttttttaacggtagaagacattaccgatctcatgggcgaacttgacagagaagagcagctagtcgttctgaacaaggtcggcaaagaaaaggcgatccatgtgatgaataaaatggacaacgacgaccttgccgcgctcttcgaggaaatggaccctgagctgaaagaccagcttctatccagcatggaagcggaagaatccgaagcggtccgcgttttgatgaactacccgcctgaaacagcgggaagaattatgacaaaccgctatgtctggattccgcagcattacacggtaaaagaagcggtcgtcaagctgaaaagctttgcggaaatcgcggagtccatcaactatttatacgtcatcaacgaacaaaaacagcttgtcggggttatctcataccgtgatctcattttggcagaacccgatgagaaggttcaggaattaatgtttacaagggtcatatcggcggacgctcttcaagatcaggaagaagtcgcaaggctcatcgagcggtacgactttctggcgattcccgttgtagaaaaaaatcatgagcttgtcgggatcgtaacggttgatgacattatcgacatcgtcatccaggaagcgaatgaagactatgaaaaattcgcagcatcaggtaaggcgatcacgtttgatacaaaatcgtatgtcgccgcataccgccgtctgccgtggctgatcttgcttttgttcatcggtttgatctctggcagcatcatgagctattttgaagacacgctgcagcaggttgtcgcattggccttttttatgccgatgatcgcgggaatgacgggtaacactggaacacagtccctcgctgtcgtcatcagagggctgtcaaaagaagagctcaataaaaaaacgattttccgcttgattttccgggagcttagagccgggattattattggcgtcgtgtgtgcgatcgtgattacgggaatcgcgatagtatggcaggggaatctgctgctcggatttgtggtagggacttcgctttttgccactctgatcatcggaacgatggcgggaacgatcgtcccgatcatccttcacaagtgcaatgtcgaccctgcgattgcatcgggtccgctgattacaacattaaatgacattttgtcgctgttgatctacttcggtattgcaactgcattcattcattcgctgtaagcagaaaagccctccttatccggagggttttttgcttgccagaattcgtaaaagcctttatattttaggcagagatcaggggggggattggtatgagaaggattgcagctgtgctgatttgtttagccgttgcattgattgttgccggctgtcagaatgaagatgaaggaaaagacaggcggctcgtcgcagttgaggatatgcttgaggcgatattggacgatgatttatcaaagatgaagcgcttgtacgtggagggcgcaaacccttctccggaaacaatcttgaaagacaagcagaaatggggaatttccgggcttcatgctgatgattttcaaatttctgaagcgagcatccatgtgtttcatgccgcttacaagatggaaaataccggtcagcccggaacgattgcgtttcggatacgcaatgatcccgataaaggcgttatgattgatttcattggatacataaaggaagcgaaaaagcaggaaaacaggtgacgaatcatccggagggaatgattcgtttttttaacggtttttgtatttaaaatgagcgttaagctggccttcgagcattttctttctgagctgctggtcgttttttagcctttgttcttttttgcgcatatctttgaggatttctgcggtctgaacaccgtcttcccgcttgtttgcgatttccatcagccgttcgacgtcagcaaaggaatatttgcgcgtgcctcttgtagagcgctgcggatagatcagcttgcgttcttcgtaatagcggatctgcctgaccgacagacccgtcagctcgctgacaatgccaattgaaatcacttttttatctttataagaaagatcttcgactgtcattttcccacccctaagatgactttttttgtattatataagaaaacgcgcgaaaaaacctgacatctgtcagaaaatctaacattgttgaaaaaatttttaaaaaatcacggaagaaaagtttacaggaaccatgcaaggggtaaaagtgttttgtatgctgtaggtacagacttttgaggggggaatcgttggatgaaggaacacaaagcagtcttactcgccaaagaaatcgttgccttagacaataagagagacgaattgctcgagacattgatgaaccttgccggcaaggatgcgtttccgctgctgagggcggtgcagaacggcttttatcaaaagtcctcttaaattccggaaggggagtaaaagcgaactttacacggccttaaagcttggttaataaataaggtctattcttatagtatacaatacgcgaaaatgaaaggagaagatcatgagcagattgttaaaaaacgctttggaaaaggaaagaaaccattacttgaaaaaactgatctcactcggtgagcataatcgggaagttttgcagaggatgacgattacggagctcagaaatgaatatttttattttttccggaaaaataaagcccgtgttcaaaatcggccattttgaaaaaacgggcttctttttaatatctaaaaaaaaataagcaggagttttctttcggataacgaaaatatatacatatagaatatgggaaaagcatgaccctttctttttctacatttgtaagggttttcatttcccgggttcattttaagaaaatagtataagaggtagatgatatgagactttcgtttaatgaggaagaagttcaccgtgctatgtcgctgtacaaggtttttgccagggcttttaaaagcgtttcagaacatagtattcgggacagcaaggaacacggctttaatcctacagaatttgctgtattggagcttttgtatacgaggggagcccaaaagctgcagcaaatcggctcgaggctgctccttgtaagcgggaacgtaacctatgtgatcgacaaactggaaaaaaacggtttcatcaaacgagagcaggacccgaaagataaacggtctgtctatgcgaatttgacggagaagggaaaggcatatctcgatgagatttatccgatccactccctgagaattgcgagggctttttcaggcttgacaaaggaggaacaggagcagctgatggtccttctgaaaaaagccggaatccacagccagcacctattgtttcgctgaaaaagtcagttttccgaacggttgttttcttttaagtgatcgagaatagctttgatctgtttgtcctggggctgtctgaagaagctttcgaaagggcatccgagttcctttgtgcgtttgacgacagcctccatcgtaaaatttaagggtgacaagtctgaatggacttcatcccaaaacagcggtgcggccactgtgccaagctcattgcctcttgtggaatacgggcagatgatcgtttttcccggggcatgctgcacatagtcaatatagagctttccgcccctgtttttgatcaggcgttcggttgtgaacagatcgggaaaaagcgagacgcaataagaagccgcaaagcttgtgaaaaggcgggtttcttcataagtaaaggcgttttttgaaatcggaatatagatttgtatccctttatttcccgacagctttggaaaagataagaggccgagctgatcaaataaacggtgcagctctttcgcggctctgacggccagcggaaactccgactttgaaggcggatcaagatcgaaaacgatttcggtcggatgggccgtatccaccgtttgaaaagggatatggaactccaacgcaagctgattggcaagccacagcagaaccgaataatcgctgcagatgatatgctcgtgctcgtcatcccgaatggacgtgataaattcgggtgcgtagtcgggcttgtttttttgaaaaaaagactctccgccggaaccgtgcggataacggataacggtaagcgcccgattgtcgagaaacggaagcagaaaatcgccgatttcattaaggtatccgatgtaatccgcttttgttttatcgcttttaggaaagatgactttatcaaggcttgtcagctgcaaatcgggatggacgtttcttgaatgaagcagcaggcggttgtaagtgcaattttcccatgccatgtcaaattcaaatgaaacaaacgacacctcgcgcaatgtcccgtaatgaatcgttaagtaatggaccgtcatgcaaatcgacggatcaatggtatattcaccgggttttgtttcggttccgtattgcttgacgatcgaaagaatggcgtttctttcctgttctccgagtccgtgggaaaccgaaccgacttccttgatttgaccgcggtcatagacggcgattgtcaaataacggtttgccatgttgtagcctgtcataaatacagcagcttttttgtagtttttgagtttgagccattcggccgtttttttattttcagcccagcggctgtcttttttcttcgcgacaattccctcgccgtcaaaccttttaacagccttccaaaggtcgtggaaatcagaagtgtcagggatgtattgaattcgagcgtgagccatcggatcgggagccatcggcaggccgagctctttcatcaggtcgaaaagcatgcgttttcgttcggtataggggagcgaggttaaactttctccgttaaaaaccagtaaatcaaaagccaagtactggcacggtttctttgcggctgcttgtgcaatcaactcggcctttttgctcaaaccccttttttggacatattcaaatcgggaacgaaaacggtttgtcaacgacacaatttccccgtcaatcgtgatcggcaagtgttctttgagagtttcgatcatgctttttgcaaattccgaaatttccggaaatgtgttttcgagcggctgtgagtttctgctgatgagcgaaacttcgccggtcgcagcaatctttaaaagaccccgatacccgtcatatttgacttcataccgccaattgccgcctgagggagctgatgtagtcaatacaggctgcatcgtaattcccattttttattttgcctctgaagcttttttgcgcgacgtttttttctttttctcagctgttccttttgctgcaggcgctttcgccgcttcccggtcaggcccttttgtccgttcgatgctggcttggagagcgctcacgagatcgattacatcctcgcgcggagcggcggccccggcatttggcgtgacaccttcattatggtcgattttctctttgattttatccatcagcgcgattctgtacgtatcttcatattgttcaggcgcaaatgtcgttgtcagctcgtctattaatgaaatcgcggtttgcagctctttttcgttgactgcggtttcttccggaacaccgggtacgtgggctgcgtttcggacctcatcagggtagtggatggactccattaaaatgcagttttcgtagacgcgaagaatggcgagctgtttttttgagcggatggtcatatgggcgatcccgatcttttctgtttttctgagcgcttcgcgcaaaagtgagtacgcttttacaccgttatctcccggtccgacgaaatatgaacggttgaaatagatgggatcgatttcctttagctgcacaaaatcaacaatttcgacggccttgtcttcctgctcttctttgagctgcttcagctcatcgtccgataagacgacgtatttgcctttaacatattcgtagcccttgacgatgtcgtcgggcgcgatttcctgatggcagtttgtgcactttttttcatactgaatcggggcgcggcattctttatgaagcgaccttaatttaatatccttatcctctgtcgctgcaaacagtttaatggggatattgacaaggccaaagctgatagagcctttccacatcgtatgcatcggttcggttcaactccttttcttttattgatgcctctctgcagattgtttcatgaatagcaacttatggatgacagaggaaaaaagcatccgggctgaagcccggatgcttgcggcggtacaagtttggagccgttcttcttgaaggaagccttagttcagctcgatttccttctggaaagacggtctgttctttctggcgagggaagacgagaagtaccgatatctgcttacgctcttgtactttgcggcgtacatagccatgtcggcttttctcatcagctcatcgccgtctgttccatcgtccggagaaacggcgattccgatgctgacggatgttttgaggcgatgctctttaatgcgaaaaggcgtttcaaactgactgatcaattgcctggtcagctgatcgatcccttgtaaaggagcgacaatgataaattcatcgccgcccagccgggcgataaagccttcattgggcacacagtgcgccaaacgctgtgcagcagccaccagcagcaggtccccgacgtcgtggcctagggcgtcattaaacactttgaaacggtttaaatccaaaaacaacacggccgtccctgtctcctgccgctttagaacatttgccagacggtcgactgcataccttctgtttggcaaatccgtcaacgcgtcatagtgggccattctatggattttgcgttctgcttcacgctggtttgtcatatctttgcatatgacataaatgctgtcaagctgctttctgacatacaccggtatcagcgtcacatttaaatcaaagcgcttttcagctatcgcgattgccgtatcgcggttgatggcctgtttttcattttggacttgaaggaaccagccgagcagcctgtcatgatcctcctgccgaaaaacggaagacaggcgctcgggttcaattcccattttttcaagaaggctgtatcccgatgaattggcggaaagcagcttgccttcaagcgaaaaaacatagatcggatcaatgttgtggttgatcaaggactggaaccgctcctcgttatctttgactttttcgatatgaagcagcaggcgtttgtcattgaaggcgccgaaaatcaagaagcattgaagcatcaggctgacaagcacgatcataatgcccagttcaacggtatcgattccttcatagcctgtgtcaacgctgtcagccatgaaaagcgtagctgctgacattcctgtatagtgcatgccggaaatcgctccgcccattaaaagcgcgcttccgattttaatgaacaatatccgaaaagaaccggtttttttggcgaatacaactgacagttttaaggcagcgaaggaggcaaaaatggcgattgcaaaagaggcggcataaagaacgggatgatagacgattgtcatattttccattgcttccatcccgataaaatgcatggaggcaattgcgcatcccattgcaagggacccggccgccagtcttccattcgtcggttttttttcattcaccacataaaatgagatgagcgagcctgcgaaagcggcaacaatcgacaacaagacgaatttcaaatcgtatttcatttcttctgctgtctgaaatgacaccatcccgataaagtgcatagaccagatgccaagccccatcgtgagggaaccggccaaaagccatccgatatttttcctgccttttgtatgtacgacccgttcagataaatcaagggctgtataagctgccaaaactgcagtgaaataggataataggacgagccatccattatattcaccaagaacttctgtcacttttttctccgcctttttgtacttatgatgaaaagtctaaataactatactgtattgtgaaaggctagactgccgtactcttaaccgttgacataaaaaagcggcaatagcgctaattccggtataattcgtgaattatactatatataatgaaattcgccaataaaaaatgatatcctcctgttctttttaaggaggacttcccattttgctcttcaattttctcgaattgtgttaaaatcatttttgtacgttctttagaacttgaaattatcaatcgtcaaaggttgtggtcgatatcgaagagtttattttatcaatggctgaggcatttaaaagcctctcgtatttaggcattttcctggcgctgtgcatcgaattcgtgccggctgagatcgttctgccgcttgccggatactgggtgtatcaaggagatatgtcgatgttcggggtcgttgcagcaggttcactgggaggtgtcgcaggccctctgacgctttactggctcgggaggtacggggggcggccgtttttggaacgctacggcaaatacttctttatcaagcctgaagcgcttgaaaaatcggacaggttttttgaaaagcacggcgggtttgtcgcattcagcggccgttttatacctggaatcagaacgctgatttccattccgtgcggactcgcgaaaatgaatgtgtgggtattttgtatttatacattcctcgcgatcacgccgattacgttcgtctatgtctatttaggcttttacctcggcgaaaactggagcaaggtcggcagcctattggacggataccttcttccggtcggcatcgggttcatcgttttgttcgttctttacctttggttgaagggcaggcggaacaaaatcaaatcgcaaagcgtttcagcctttataaataaaaataaggattgacagccgtgcgcatatgaggttaatattatcttataattcaatattttcttttatcccaaaggggagtagcgtccggatgtttaaccggaaacaaagtcgtcagttcatggatcttcatccatcggctttgttggcatgttttaaataatgataaccatgtctagcaagacctttgcctaatgttggcagaggtcttttttgttttctgaaaataccctgccgcattagcgggaataagagaaagagacaatcacttaggaggaattacaaaatggatgcagcattattacttgaatatggttgggttcttctcatcctagtcgggctggaaggcattttggccgcggacaatgccctcgtcatggcggtcatggttaaacacttgcctgaaaaagacagaaaaaaagcgctcttctacgggttggccggcgcgtttgtgatgaggttcggcgctttgtttgcgatctctttccttgtcaatgtctggcagttgcaggcgatcggcgccgtttatctgctttacatttccgtccatcatattttgaaaacccacgttttcaaaaaggacgaaaaagtgaaggagacgaagcaaagcggtttttggccgacggttatcaaagttgaactggcagacatcgcttttgccgtcgactcgattttagctgcggttgcgctggctgtcacacttccggcgacaaacctgccgcaaatcggcgggcttgacggcggacagttcatggtaattttagccggcgggatcatcggattgattattatgcgctttgctgcaagtcaatttgtgaacttgttaaagaaacgtccgagcctggaaacggctgcttttctgattgtcggctgggttggtgtgaaactgacgctctatacgctcgcacacccgcaaatcaatatcgtctctgaacattttattcattcaggtacttggaagttcatcttctgggcggtgctgatcgccattgcgctcgggggatggtttatgacaaatccgaacaaacacgagaataaagctgctgaggagtaaacagcttttcccagactgccggtctttcaccggcggtctttttttgcccgcacgaggaagagccggggaagatggccctagatcaatcgaaataagatttcattttattaacagccatgttacaaaaacggcgggaaaacccccttaatcgtcaaacagatcacgaattgttctaggagatcaaacaaatgactgtcacaattgaaaaattagaaatgaataccgcgttttctcctttgcgaatccctatcaaattagctatcattaatgagtagtatagggaggaactgaggtgaaaccagtgcttagccttttgtttaagacaggaaaaaggaaacaatcattagaagagtctgtaataagcatacaaaaaggaaatcagcagttgcaaaacgagcttatcgatcaatataagccttttgtggctaaaacggtttcatccgtgtgcaaacgatatatagatgaaaaagatgatgaattcagcatcggcttgattgcattcaatgaagccattgaaaaatattcttcagataaaggaaattctctgcttgcatttgcagagctgatcattaagcgcaaagtcattgattatatcagaaaagaagcgagaaatgcccagaacatcaatatggacatgcaagaaggagaagaacaggaatcctcccaaagcatgattgaagcggagctttccattcatgaattcaaccgcatgctcgaacaggagcaaaggcgggaggagattctccattttaaagaaaggcttaaaagttttggcctgtctttttccgatttgctggagcattccccgaaacatacggatgcaaggcaaaacgccatcaaagtggcatatacgcttgtcgaacatgaagaattaaaaaagatcttgtttgaaaagaagcagcttcccgtcaaacagcttgaaaagcttgtggctgtcagcagaaaaaccgtagagagaaaccgcaaatatatcatcgctatggcgatcattataacgggcgattatgtttaccttaaagattatctaaaaggggtgctcaattcatgagaagaggaattattgtagaaaaaaataaaaaattcgtcacattgctaacccctgacggacaatttttaaaagcaaagagcacagaggaagattatgaaatcggtcaggaaattgcttttcccgcggagacgagaatgtcgagaaggcgtgcgggcttttttgatctgctttcgctccgtccgctgaaagccggcgttttttcaatcgccgcgatcatgctgctcgctttcatgatcatccctgatgttttaaacaataaagcatacgcctacatgacgatcgatatcaacccaagctttgaattgacgctcaacaaaaactgtgaagttatcgatttggtgccgctgaacgaggatgggaaggccttaatggatagtataaaaaattgggaaaagtctgactttaaagaagtgatcagtgaaattgtcgaagacagcgataagagcggttatgtcaccgaatcaaaagaagtgcttatcgccacagtatacgaaaacaatgaagatgacacgtataaggcgacggtaaaaagcgaaatcgatgatgtagcgaaaaaatacgagcagcagaattataagatggaagcggtggaatcagaccttgatacgcgtgcaaaagcccaaaaagaaggcatctcaacaggccgttatatccgttcccacaaagatgaattagaagacaaaaacaaagatgatgacaatgaaaataaaaaagatgatcaaaatcaggaagaaaacacaggagaaaaggagaaagctgtgaaagaagaagatcagccggaacagcatacggatgataaagaagcagatacggaagatcatccggacggcgaaaaaccttcagatgaagatcagtctcaacctgatcaagaaatggaaaaagaaaaggagtcaaattcccctaataccaaaaaccctcaggaacataaccataatgacaaagacggtcagcagacggaggaaggaacgccaaaaagcggttccggttcaaatcaagagagctctaaatcacctccttaccaaaaggagaaaaagccttctgaccaaacgaataaacaagaatatccgccgagcgggcccggcgaataatccatagggtatttatttgtcattatgcccattcaattgagcttgtgcctgctgtacaagtcgttttgtcatttccccgcctacagatccgtttgagcgagcgaccgagtccgagccgagctggacgccgaactcttgggcgatttcgtatttgaactggtctaaaacctgctctgccccgggaacgaggagcttattcgttcttgccatgcattctcaactcctttttcaattggtactgcttgtttagtttgatttggactgaggctttttatgctggcaattgttgaagggcaaaaaaacgcctggcaattggcaagccaggcgcgccggtcggcgattatttcatttcatattttaagaagacgctgtcaatcatggaatgtgcggtcgcctgaatgtgcgaagcgatgacggacagcacagtgactgcggtgatgtctctcgctttgttccattcgggatcggccagatctttataaaaatcgcggagctgtccagtctgctcaatgacgattttttcaagcgccgatttattgagcgtatagtctttgatctggtacacatgatcaaggacccgcgcatacccttcataaaagcgcagcggactcactacatcatcggagcggtctgtaatcgtattaaaaatcgttgttaagatcggacggatcgtttcgaagtcataaaccgattttaagtctcgtacaatgagaaggatgacggcttggtcgatggaatattttttgccgagttccggatgccccatcaaatcttttatatcgcgtttgatccagttttggatggctgtcgattttaaggatgtcagttcgcacaaatttccaagttcaacaatttcatttgtggaaagtccctgttccgttttttgttttttccgttcgtaccgggcaatgaattcggggatgtccaaattgtcttccggctcatcgggcgccaaatcggccgatctcaaaagaatcgctagcggactgacatccagctgcccttttaaagcgtacatcagtttggccatttccaggcgagtcagtttaaaaggtttcatcattccacctcattatgtattaaaatgaaatagcaaacaatataaacattatcttacgtcttatcacttgcattttcaattctatgccgtataattttattatacgagttcatttgatcttattataacatggaggtaatcatgggaaaaagaatctttctctttcttttatcgaacatcttagtcattacgacgatcggtatcgtgctttcgattatcggttcgctgacaggggtaggcacgtatttcacggctaacggcggcatcgatattgttgcgcttctcgtatttagtgcagttgtcggttttgtcggctcctttatgtcgctcttgatgtcaagatggatggcgaaaatggcgatgggcgttcaggtgctgaatcctgataagcaaacgctcagctatgaagaacagcagctcgttgaccgggtatataagctgtcccgcgctgccggactgacaaagatgcctgaagtcggcatctacaattcacgcgaagtgaatgcctttgcgaccgggccgtctaaaaaccgctcgcttgtcgctgtatcgacgggccttcttcaggaaatggatgacgacgcagtggaaggcgtacttgcccacgaagtggcgcatattgcaaacggcgatatggtgacgatgacgctccttcaaggaatcgtcaatacgttcgttgttttcttcgcaaggattgcggcatgggctgtttcacgcgttgtccgtgaagagctggcgccgatcgttcactttatcgcggtcatcgtattccaaattgtgttctctattctcggaagccttgtcgtgtttgcgtactcccgccaccgcgaatatcatgcggatagaggaggagcagaccttgcaggcaaggataagatgattcacgcgctccgctcgcttgagcagtacacttcaagagtcaaagaagaacaggcatctgttgcaactttaaaaatcaacgggaaaaagcatacatcgcttttctcaacacaccctgatttaagcgacagaatccgccgtctggaagcaaaataataaagatgcaaaccccctttttcaagggggtttgctttttaaatttaaaaatcgaaaagcggctgtacataatagcatgtttcctttaaaatggaacacgttatacacaagaagcaacttttgaatattgaaaagaaggaacgattatgaaggttttattgagaaaactactgcgcgtgctgtctcctgtacagctgatcgcgctctattattttttagcggtgacagtttcggttgttttattgagtctgcccgttgcacacaaaaataatgttgaatggtcttttatcgacgccctttttaccgcggtgagcgcagtgagtgtaaccggtttgacggttgttgatacagccgatacattcagcacggccggaatttggattttggcgtttgttctgcaatttggcgggatcggcgtgatggctttgggtacattcgtctggctgattttcggcaagcggatcggtttgaaagagcgccgtctgattatgaccgatcaaaatcaatccaacctatcgggcctcgtcaagctgatgaagcacgtgctcggcttaatcctgctgatcgagctgtttggcgggctgattctcggcacttatttcttaaagtactttgagacacctggagaagcctttatgcacggattttttacaagcatcagtgcaacgaccaacggaggtttcgacattacaggcaactcgctgattccgtttcagcatgattatttcgttcagtttatcgtgatgatgctgatcattcttggagcgatcggttttccggtcctcatcgaggtaaaggattttctgctcagcaaagagcgtaaattctctttcagcctgtttactaaattgacatcagtaacttttttccttttagtaattggaggtgcgatcggcatatttgccatggaagcgcgctttgctttttcagggaaatcgtggcacgaggtatttttcttttctctgtttcagtcgacgacgaccaggagcggcggactcgcgacgatcgatatcagccaattcacgcatacgaccattttgtttatgtgtatgcttatgtttatcggcgcttcgccaagctctgtcggagggggcatccggacaacgacctttgccttaaacctgttggccctgttccacttcgcgaggggaaataaatcggtgaaggttttcaaaagggaactgcaccaagcggacttgatgaaatcattgattgtaacgctgatggcggttattcttgttttcgtctcgacactcattttgacagtgacagaaaagcattctttgcttgaactgctgtttgaagtgtgttcggccttcggtacgacgggcttgtcgatgggcatcaccccagatttgagcacgattggcaaaagcgtcatcatccttctgatgttcattggccgaatcggcattgtcacgctgctttatttattcggcagaaaagaaatcgaagcgaattaccattacccgaaggaaaggatcattatcggataagaaagacagtttagtcaaactgtctttttttatgatcataaagtcggtcgctgtatttatttgtatgatataatgcttaaatggcggacttgaaaaaaagggggaaacaacgatgaaaaagagagtcatccatttgtttatagccgccggatttctattgctcgccggagcctgttctaacgagccgacagcaaaagaaagcatggaccaatatgtagacaaatggaacgagcaaaaatttgaagaaatgtatgaacagctgtcggctgaagcgcaaaaatcgatttcaaaagacgatttcatcaagcgtaatcaatctatttatgaacagattggagtttccgatttgaaggtttcaaccgtcgacaacgatgaagatgaaaaaaataaagagaaaaatgattcggtgacgataccgtataaagtcagcatgaagacattggccggtccggtttcttttcaaggcaaggcaaagcttgtcaaagaaaaaaaagacggagacacttcatggaaggtcaactggaacccatcctttattttttcacagctgaagaaaggggagaccatccggattaccgccaaggagccaactagaggcatcatttatgacagaaacggaaaggcgctcgctacgaatgcgacagtgcctgaaatcggcgtcgttccggggcagctcggagatgataaagacggtgtcatcaaaaagctcgcgaacatgcttgatatggaaaaagaagacatagaaaaacagctgtccgcaagctgggtgacggacgattcattcgttcccctgaaaaaagtgaagcctggcagcaccgagcttctcaaaaaagcgacctctctccccggggttttgaagcaggatacgcagtcaagatactatccttacggtgaaaaagccgcacatcttaccggttacatacggccgattaccgaagaggaattaaaacagaataaagaaggctacagcgagcattcactgctcggaatcgtcggtctcgaacatatttatgaaaaagagctcagaggagaaatcggctggacgatttcgatccctgaatcaggcgcgacggttgcgtcaaaggatgcaaaagacggaaaagacatccacaccacgatcgacattaagaaacaggaagaactgtacagccagttaaaagatgactccggcgctgccgttgctttagaaccgcagactggagaaacgctggcgcttgtcagcgcgccttcatatgatccgaacgggtttttgttcggctggaaaaaaggagaatgggaaaagctcaacaaagatgcgtctgcgccattcacctctaaatttaataaaacttatgctccgggttcaacgatcaaaccgatcaccgcttcaatcggtctgaaaaatgatgcgatcaaagcggatgaacctaagaagatcgaagggaaggaatggcagaaagattcgtcatggggcggatataaagtcacacgggtttccgatcgactaagcgacgtcaacttggaaaacgcgctgatcacatccgacaacatttatttcgcccagactgcccttgatacaggcaaggatcaatttgtcgaaggcctgaaatcattcggctttgaggaaaagcttgattatgaattcccgacgaagtcttcctccatatcaaacgaaggaatcgactcggatattctccttgccgattcaggatacggacaggggcaaatgctgatgtcgccgatacaccttgcggcaagctatacgcctttcttgaatgacggtaatctgatcaagccgcacctgatcaaaaaggacggcgaagagaaagaaatatggcataaaaacgtactgcccacaggcggagcagaagcgattacaaaagggttaaaaggcgttgtagaagacccgcgcggctcggcttacaagccggttgtcaaagggcttacgatcgcagggaaaacgggaacggccgaactgaaaacgaaaaaagacgaaaaaggcaaagaaaacggctggttcaccgcctatgattacaaaaacaaaaaccttttaatcacgatgatgatcgaggatgtttcagaccgcggcggcagctcatacgtcgttaataaagtgaaaaaagtgtttaaataagcacccttcagggtgcttatttttttgccgaaaactggatgtgtggaatgtgccgaaacggaaaggatatggatgaaacgactaaagaaaggaatgtcattatgaaaagaaaagttgccaggaatgaagcggctcttaacaataaaacgcctgctgaaagcatgcatgatcatcaatacatgacccaatatgacgccgaaaacggagacaggggagccaaccgcaactcgaaacacgggaagcagggagaatcgcaccaatgaaaaaacaccaaaaaagcaaggatatgcaaaaccataaaaaaccgatgaatcccgatgtgcttcaggaggaattttcgaacgaactgggcgatgtcaacgcctttaaatttatcgatgtgatcgagaacaataaaaagaagaacaaaaaggcggacggacagaagcgggataaagataaagaatgaaactgcagagcaaacgagaaaggtccaaatcggaaacgatttggaccttcatttattttaaataagggttatatccgttgtcttttttcaacagccttattaaattcgtcatttttaattcgatgaacggctgggcgaccgttttcacaaatccgcttgataagcagaaggttaaaattgccgtggcgatgaacaatagcgtcagactctgataatcggcaagccattcttccgcgcccgtctttctgaacgacttgatgataaagccgtgcagcaggtagacatagaatgtgcgcgttccccagagggtaaagaaataccgcctttcaggcaccagcgccatgaacgcgaaggttgaggcaaatgttataacgagaagcgccacccggtttaacccgctttttatcccgacatcgccgaattccgaataaggcttggaaccgaacagccaggagtaatcgaagtctgcaaaaaagtagaaaacgaacgttgctgctaaaacggctagagccgcttgctttcctttccagcctttcagcattttaaaatggtctttttgcaaataatagcccgccaaaaagaccggaaagaaaacaaacgtgcgggacaggctgagcgtgttgctgatcatgtcgatatacccgacaagaacggcaatcgcaaagcttgcggcaaacgcccatttcgccggcagttttgtgaacggaaacaacaggagattccaaaaaaacaagctcagcaaaaaccaaagcgaccattgcggttcaaacggatttgcggcagttaagctttgatcatcgataaaggaataaaacagcgtatagattccctggaaaatcaaatagggaacgatcagcttccaggcgatttttttgacatatccgggccgattgaacccttttgcaaaatagcctgatatgagaataaaagcaggcatatgaaacgtgtaaataaatttataaatatgaagcagtgcatcattgtcatgaatataggacctgattatatgtccgaagacgacgagaaaaatcaataggaattttgcgttgtcgaaatagctgtcgcgtgaattcgccataacatcaccctttcgcaaacaatttcaggaggcgccggtgcgggaagattctgaacccggctacattctttccggaatgacgtcttcaaccagtcttgcctcattttaaaattttaaaatagaaagcatgtgttttcctatgcattaagtcttattgttaggccgatgtaattgaacagtaaggaacttttatatcgtcatcttcatgtaaaataggcggaaaggttgtaaaagtttgaaacaaatgaaggaagattttccggtttgtagaataattggaggacaggttttcaagaaggagtgtaataaatggaggaaactcttgatttgaatgaatccttaaatctgcaaaaccagctgaacagactgaagaaagaaaacgccaagctgaaagcggatttgtatcagtatgagctgctgtttaacgggacgctggacgctatttttatattggataaacagatgaacatcattaaggcgaatgatgccgcctgcaagatcctgcaaagccaaaaaaagaatttgctgaaccggtcggcgctcgacttcctgcacgccgttccgccggatgaactaaaccagaacattcaccgcttcttggagcggggatatgcgaaaaaagaagtggccatcaggcttgacaacggatctgtcaaatatatcgaatttaccgcaagcaaaggaatcggtgaggactgcttttttgtcgtcatgagagacatttcgtctaaaaaaatattggagcgggagcgcaccatcaatgaaaagctgtttaaagatttgtttcaccgcgcggttgaaggaatcgtcatctttgataaacaaggctgtttcatcgatgcaaaccattcgttttgccagagcttcgaaattgaaaaatcagagctctcaaaactgaagctgtctcaattcgtatcgcctgaaaacaaggggcggctcgataaaatctggaacgctcttttcagaagagggaaggcaaaaggggagcttcctgtccgcctcagatcaggagaagacaggctgtttgagctgacgataacctcgaatattttaaatggcttttacatgtcgattatgagggatattaccgaaaagcgctcaatggaaaaacagctgtttaagagcgaagaacgctttagggaagtctttgaaaatgcgatggatgccatcattctgatgaataacgacggccgcatcgtcaaagcgaaccagtcggcctgcaaaatcttcgaactgccgatggaccagctgctcaacaagaagatgactgattttatagatcgaaccgatcagcggtatcatgccattcaaaagcagtacgatcaaaaaggggaaatccgggcggaactgctgtttcgtatggcaaacggacaatataaggagcttgagttcacatcaaaacggattatgttcgacagccaggacttaaccattttgagaaatgtcagcgacagaaaacgaatggaacaagaattgcgggaaagcgaattgaagttcagaaaagtattcaacggatcaatggacggaatcgttcttttcaacaaccagtacgatattatcgatgcgaacccccttgccggaaaaattctcagcatccctcttgaacagctgaaaacgtccaatcttcttgatgtcatctccggctatcacatcgaaaacgcggcttctcccgctaaaacgatttcctttgaagaaatggacaatgatatcccattcctgctgagcgaccaaaaacggatacttgaattttcatttaagcgaaacatcattcaaaatatgaatctggcgatgctcagagacgtgacggaacgaaaagagcttgaagagcggctccgcaagtctgataccctccatgtcgtcggagaactcgcagccggaattgctcatgaaatccgcaacccgatgacggcattaaaaggatttatccagctgctgaaaggcagcatccaaaatgaggatcacgcgctttactttaatgtcatcacatcagagctcaaaaggattgaatccattattacggagtttctcatccttgcaaaaccgcaggcgattatgtatgaagaaaaaaacatcgtcaaaatcatgcaggacacaatggatctgctgcatgcgcaggcaaaccttgacaacgtccagatgcatctgaagtgcgaagacggcattccgctgatctactgcgagccgaatcagctgaagcaggtatttatcaacattttgaaaaatgcgatcgaagtaatgcccgacggaggcaatgtatatgtgtcgatcaaaccgaaaggagacgaccatatcattgtctcgcttgctgacgaaggaatcggcatgacagaagacaaattgaagaggctcggcgaacctttttacacgacaaaagaacggggcactggactcgggctgatggtcagttataaaattattgaagaacataaaggaaaaatcgaagttgaaagtgaagaagggagaggcacgacattccacctgactctcccgatcagacagcagcatgaggaggaggcttaatcgcatcgtgggcttttatattgaaatgacctcgccttttggacaagcctacatcgtcgaggaaaataaccatattacacatttgctatttgaaaaagaagaactaaaacagcttcaacaagacggcctggagcttcgcccggccgaaacggaattgttgaaggaggcaaagcgccagctcgaagaatatttccagggggagcggaaaacgttcacccttcctctccgccaggatggaaccccgtttcagaaaaaggtgtgggaggcgctgcagtcgatcccgtacggtgaatcacggagctatttagacatcgcatgcgccgtcgggaatccgaaagcggtgcgcgcaatcggccaagccaataaaagaaatgcgctgccgattttgatcccgtgccaccgtgtcatcggcaaaaatcgttcattgacggggtattccggaaatgaaacggataaaaaagcggtgctgctcgacatcgaaaatattgcgtataaaggaaaataatatacgagcacgccgtttctttttttcgtccgcgacatataattttattaagttaaaaatgttggccttggtaaaaaaggaggacgaataagtgaaaacaaaccgcccgaaaaaaatagcaggatacgcggaattgttcgtcaagctgcacgttttgaccgaagagcaaaagaaagacatcatcaaatcgattaaaatccgctaaagcggcctaagtaagggcttcagcggaaaacagcgcttcgatttcttcttcaaatctatctgtgataatccctttttccgtgatgattccagagattaaatcgtgcggcgtgatatcaaaagcaggattgaacacaggcacctcttgcggcgctatttgcgttccgtttatccgtctgacttcatccggatcgcgttcttcaatcggaatgtcgtcgccgcatgaaatcgagacatcaaaagttgacaggggagcagcgataaaaaacgggatttgaaaggctttggcgaggattgccaagccgaacgttccgattttattggctgtatctccgtttcttgcgatcctgtccgctccgacaatgacggctgaaatgttcttttccttcatcgtatgggcagccatgctgtctgtaatcagcgtcacgtcaatccccccctgcataagctcccacgccgtcaggcgcgccccctgaagaacaggccttgtttcacaggcgtaaatatgaaggtcgagatcctttgttttggcaaggtaaaacggggaaagggccgttccgtacctgcttgtcgcgatcgagccggcgttgcagatggtcatgatgctgtcgcccgatttgaacaaatgcagagcattctgtccgatctgccggcatgtttcttcgtcttcaacctggatctgaatcgcttcgtggacgaggtttgtttttgcctcattgaccgattttgcgccctctgcgctttttaacagccgattgagggcccaggataaattgacggctgtcggccttgcctgattgagttcatctttgattttgcggagctcccgcagaaaagcggaaacatcagatgtatcgatgctttgtgcgcaaagggcgagtccgaaggcggctgttatgccgatggcaggcgctcccctcacttttagcgtttggatcgcatcatagatgtcttctttagttgtgagatgcaggtactccgtcttttcgggaagcttttgctggttcaggatttttaccgatgtttcttcccattcgacagaacggggcaccgcaaattgttccggcatgtcattcactccttaagcgcgtttcgaaacgcttcaatcatgtcttttggcgtccggaaaccgctgcgtttttctatgaatgctgcgcctattttaagggcgagctttttttggctgattctccgggaaaatggaacgattgtatcaaggtccgcaacatgggcgaggccgatcgtccggcggatcatttcgcagccggcgaagcctgctgcgtcttcaaacgcctgtctcaggactgactcaaggcgcccattctcatgtttgcaagtctcaacagcatcgttttcccatgcttcgctgaatgtccggctgaacgtattccagacggtctcgacatggcggtataaaggagcccgcctgttttcttcgcgagaaagcgcgtttaacagcaggttggcgataaactgtccgatgtcaaacccgatcgggccgaaaaacgcaaactcagggtcgatgattttcgtttcgccatcttcgccggcgaaaatgctgcctgtatgcaggtctccgtggatcagcgtttcctccgctgataaaaagcgctgcttcagttttgccgcttcaatttttagcgcttcattgccccaaagaacttctgcttcatcgcgaagctcttcttcgaaattgttcgtctcatggtcaaagaaagggtctgtgaacacaaggctttctgtaatatcgcacagatccggattcgtaaactgcttcacaagccgctctttaaccgttgggtcaagcgcatattctgatgagtaaaaatgcgtttttccaaggaattctccgatatcttccgacagatgcgggtaatccttcccgtcaatcagtccgtttctggcgatttccaagtgagaaaggtcttccaatacggtgacggcaagctcggtgtcagaatagtacactttcggaacaaggtgcggaacgtgctcagcctggcggatcagcgcactgctttcgattcttgccctgtcaagcgtcagcggccagctttcgccgacgacttttgcataaggcaccgcctgcttgatgaccaatcctctttgctgctctttgtcataaacgcggaagaccagattcaggtttccgtccccgatctctcggcatgtcagggtgcttttgcttggaaaaagcccgagacggacggcaagcgcggccgcggagctttcagtcaaagtttcgtatgctgcggtttttgttacggtcatgtgtgattccccctaaaatgtcgttaacaaataaaaaagcctctttctcgtcgagagaaagaggctgatttgtcgcgtacgcctctcttatctctcagaattcaaagtctgatggaattagcaccgtgccctagcggcgcagagattcgcgccccatttcacaatggtattacggtcggttgctgttgggatcattaggccagtccttcacccaactctcgataagagaaatcaatataaaattttgaaatttcagttcggtcagttgctgaacatgttaccagcatctccgttttcttgtcaacatttttttaatataaatctttgcgaatgtcctcaaaaaccggaatttgcccccgcgctttttcaatgtcccttaggtcgatttcggccctgatgaccgcttctccgcgtcctgcttcagcaagggtgcggccgagcggatcaatgactgtgctgtggcccgcaaattcgtttgccgggtcttttcccgaacgattgcaggctgcgacaaagcactgattttcaatcgctctggcttttaaaaggctttgccagtgatcgaggcgggcgagcggccactccgccgatacaaagatgatgcccgcaccttcgctcgtatgttttctgatccattccgggaaacggatgtcgtagcagatgaaccccgcagccggcatcccttcaagctcgaagcgcccgtcgcctgagcccgctgacaaatagaggtgttcgtccatcagctgaaaaaggtgagctttgctgtattctttgatcaaatgtccgtttttgtctgcgatgtacatgatattgtacacaccgctttttttcttgactgcgactgagccgcatacgatatggatgcggtttgcttttgccgtttcctgcagccatctcttcgtttgcctgccttcttcatccgcgatggagccgagattttttaaatcataacccgtcgtccacagctcaggaaggagaaggatatccgccttccggctttcctgctcgatcagctgctccgcttttttgaaattttcagaaggattgccgtacgcgatatcgaattgcaggcatgaaattgtcagcttcactctggatcacctcatttttttctttacattttacatttaacaatatatgatgatggactatcatttcaagaatttttcaaaagcgggtgaatcgtatgaaatttgagcattcagatgtactgaagcagctgccggagcagtttttcgcttccttggtcaaaaaggtgaatgaaaaaattgccgccggccatgatgtcatcaatctcggtcaggggaatccggatcagccgacaccggaacatatcgttgatacaatggcgcaagccgtccgcaaccctgaaaaccaccggtattcttcctttcgcggcagccgttcactcaaggaggcggcggccgcgttctatcaaagggaatacggcgtagagctcgatcctgaacgcgaagtcgctgtattgttcggcggaaaagccggtcttgtcgaacttccgcaatgtttgttaaatccgggggatacagtgctcgttcccgatcccggctatcccgactactggtcgggcgttgaactggcaagagcgaacatggaaacgatgccgcttacagcggacaatcagtttctgcctgactacagccggattcccaaggaagtgaaagaaaaagcgaagctcatgtatttaaattatccgaacaacccgaccggtgcccaagccacatctgcttttttcgaagagaccgtccggtttgccaagtcgaacggaatttgcgtcgtccatgattttgcctacggcgcgatcggctacgacggcaagaggcctgtcagctttctcgaaacggcgggagcaaaagacgcaggaatcgaaatttacacgctttccaaaacgtataatatggctggatggcgggtcgggtttgcagtcggcaacgcctctgtgatcgaagcgctgaacctttaccaggaccatatgtatgtcagcctctttaaagcagtccaagacgccgcggcggccgcgctcctatcagatcaagcgtgtgtccaggagcaaaatgagcgctacgaaaaaaggcggaatgcatggatccgcgcggtccgcgatatcggctggcatgcggatgctccgcaaggatcttttttcgcctggatgcctgttcccgacggctatacatctgaggctttttccgatctgcttctcgaaaaagcgaatgtcgtcaccgcgcccggcatcggcttcggcaaacacggggaaggctatgtgagagtcggcctcttgacaagcgaagagcggctccgggaagcggcttcgcgtattgccgagctgaatatattcaaaaagaccggccacagtcattgacaaccgggagaaacgatgggataattcaaaataatttataaaatcaatattcttatcaagagcaggcagagggacaagcccgatgaagcccggcaaccgactttttaagcacggtgctaattcttgcagctgacgctgagagataaggattcgaacctgaaaagcgaaacctcttttagctaaagcagcaaaagaggtttttttatatgcatgaagcaggaaggagctacagaatgagtgaacttttggcaacatatatcttggccgatccaggctgtgacgcagaaaagcgggccgagcaaatcgcgatcgggctgacggtcggatcgtggacagatctgccgctcttaaagcaggagcagctgaaaaagcataaaggacgcgtcgtcaacgtcgaagaaacagaaagcgagctgggggaaaaacaggcaacggtcaccatcgcctatccggaagccaattttacaaacgacattcccgctgtgctgacgaccgtttttggaaagctgtctctcgacggaaaaatcaaattggcggatttggagttttcgcggtcttttaagcaatctttgccgggtccaaaattcggcgtatacgggatccggaaaaaaatcggcgaatttgaaaggccgctgttgatgagcatttttaaaggcgtcatcggccgcgatatggaagacttgaaggaacagctgaggcagcaggctcttggcggagtggatttgatcaaggacgatgaaatcctattcgaaacaggcagtgccccctttgaaaaacgaatcacggaaggaaaaaaagtgctcgaggaagcctttgaagaaacagggcgcaaaacgctgtatgccgtcaacctgacgggcaggacaatggagctgaaagcgaaagcgagaaaagcagccgagctcggagctgatgttttgctgcttaatgtgtttgcctacgggctcgatgttttgcaaagctttgcagaagacgatgacatcccgctgccgattatggcgcacccggcagtaagcggcgcacttacttcatcgccgcattacggtttttcccattcgctcttgctcggcaaactgaaccggtatgcgggtgccgatttcagcctgttcccttctccgtacggaagcgtcgctctgccgaagcgagatgcgcttgccatatacgatgaatgcacgaaggaagacgtctttaaaccgacattcgcggtgccgtcggccggcattcaccccggcatggtcccgctcttgatgaaagactttggcattgaccacatcatcaatgcaggcggggggattcacggccatccaaacggggcggcaggcggaggaagagcgtttcgggcggtcattgatgccgtcttagaagcggagcctgtcgaagagaaagcaaagcgctctcccgatttgaagctcgcccttgaaaaatggggaagggttgaggtctctgtatgagaaagccgcttatcatttgcgattttgacggaacgatcacaacaaacgacaacatcatcagcattatgaaacaatttgctccagaagaatggaccgctctaaaagacggggttctgtccaaggacatatcgattcgggacggagtcggcagaatgtttaatttgcttccggccagcctgaaagaagacattacggcatatgtactgaaacaagccgagacccgccccggatttaaagaatttgtttctttcctggatgagaagggtcttccgttttacgttgtgagcggagggatggattttttcgtctatcctctgcttgaaggaattgtcggaaaggaccgcatttattgcaacgaggccgctttcaccagccgcaatatcgagatccgctggccgtatccgtgtgacggcggctgcggaaatgactgcggctgctgcaagccttccatcatccgccggctgaaaggccgggacgatttcgttgtcatgatcggggactctgttacagatgttgaagctgccaaatgttccgatttatgcatcgcgcgcgactatttgctgcgggaatgtgaagagctcggcttgaagcatgcggcattcggcgatttccgcgatgtaaggcgaatactcgaagagaccgcggaggtgaaagaatggatgtctgagcaaaaacggcaggaactagccgaggtaaaaaaagagcttgcggaaagggattggttcccggcgacaagcggtaatctgtcaatcaaagtatcagaagacccgctgcggtttctcatcacagcaagcggaaaagataaaagaaaagagaccgaggaggattttctcctggcggacgaagaggggaggccggcggagaccggacacgcgctgaagccgtcggcggagacgctgctgcacacctatgtctatcaacacacaaacgccggctgctgtcttcacgtccacacggttgacaacaatgtcatctcagagctttatgcaaaagaaaagcaagtgacattcaggggccaggaaatcataaaggcgctcggactttgggaggagcacgcggaggtcacggtcccgattatcgaaaacagcgctcatattcctgatttggcggcggattttgccgggcacctttcaggcgattcaggcgcagtgctgattcgcagccacggcattactgtctggggaaaaacggcatttgaggcaaagcggatgcttgaagcatatgaattcttgttcagctggcatttaaagctgaaagctttgcaggcttatcacgtttaactaaaaaagggggagaaagcatggcgacaattcggatccatgatgaacaaaacacgagcattgaaaaccaggaagaagtagaacaatttctaaagcggcaggaggtcatttatgaaaagtgggatatcacaaaactgccggccggtttaaaggaaaaatacgatttgaccgatgaagagaaacaggagattttagacgtctttgccgctgaaatcaaagacatttcagaacgccgcggctataaagcgagcgatgtcatctcgctttccgaccaaaatccgaaactcgatgagcttttgaaaaacttcaaacaggagcatcatcatacagacgatgaagtcaggtttatcgtcagcggccacggcatctttgcgatagaaggaaaagacggcacattttttgatgtccttttaaatccgggggatttgatctctgttcctgaaaacacccgccattatttcacgcttcaggaagaccggaaagtcgtggctgtcagaatctttgtgacgacagagggctgggtgccgatttatgaaaaagagagtgtgaaccagtcataaaaaaagcgtccccggggacgctttttatttgtttctgtcataaagagccttgatgtggccttcatgaaatgaaagatgcggtttttcattttgatagtattgaagacggtcaaatacagagcctgtgtgaagctcgaacttatggccgtctggatctgagaaataaattgaatctctgtctccttcattctgttttctgcccttcagcacattaacgcctaaatcgtgtaatttcttttcccagaacggcaaatcttcctgttggatcgaaaacgcgatatgggtgtaagagtcgtggatttcctgtcttttaatgtctttctcttcgttgaatgcgagccagatgccgttcaggtcaaaataagcggttttctcggcttttacgagccacttggcatcaaacaccttttcatagaatgaaatagagacggacaggtcagagaccgaaaacaagagatgattgatgccgaggattttattgttttccattgtaatttactctccctgttagatgtgtttcaaacccgtccagctctttggtgatttgcctgaagagaaaagcgagcacagccgcatcatcaagccagccgacgcctgcgagaacatcggggatcaaatcgatcggtgacagcacatagataaatgccagcgcggccagcaaaattgtttttttcgggaataaggggtagtctccctttctccaggctctaaatgccctgaaaaacaataagaggcctgaatatgcttctttcacggcaaagacggttcggagctttgaaactggttttttcatcatttggcgcatcattggacctccttctatccgtatgaactcttttaaaggtggtttaccatatttcatcgatgggtataacaccattaattccacaaatctattatactcgatttcaaaatatttttttcggaaataggtttacaaaataagtataatctgtaataatgctcaagtacgcaaaatctggatggttttaagaaacgatatgttggtaaggggtgaagcgtatgcaaaggtatattgaaaaagaagcattgctcgtttccatcagcaagaagcggcaaatgatggttgaagccgctgaaatctatggatatacaggggatgaaacgatcaggcggagccaggagctggatcaattaatttatgaatatcaaaaattgtctatgaatgaaaacgcgccagacaatctgctgcaagattttttaggctgcatcgactgtctgcccgttgaaaaatatacggcatagcggatgaacgaaaaagagctgccgtaaggaaggcaggctcttttacaggaacggggaaacctcagtcgtcctgttcctttgaagtcggcagcgtaatcgttacagtcgttcctttatgccgttcgctttcgatatgaatggttcccccgtacatggaaatgatgcgcttgcacacgacaaggccgagtccggttcctttttcttttgatgtaacaaaaggctggaaaatactttccatcatttcttgtggaatgccttctccgatatccttcacaataatttgcgccttctcttgatcatgttcgatttgaatgaccagctttccgccgtttttcatcgattcaagagcatttttggcgacgttcaagacaacctgcttaatatgatcctttttacaatacacataagccggatcttctccgcagtcttgaaattccacttccacattatataaatttgcctcagaatgaataatcggcatgatctcgtcaatcatttcattcatggagttgagctgccactgctctgccgtcggctttccgagcacgagaaactcgctgacaatctggttgatcctccggatttcctggtcgatgattgagaaatacatttgatcttcttttgattgatattttttttgaaggagctggataaagccgctgatgcctgtcagcgggtttctgatttcatgagcggtgctcgccgccaaggtgccgattaattcgagcttctgcgcttcattttgggcgcgctcctgcttggtccgccgcttcagcaggacatactggagcaggaggaacataatattcagcagaatgaaaatactcaaaaatgacagcagaagactgtgaacgatttcatcaagctggaccggttccggatagacttcaagcttccagtcgatctggtccaaaaaagcgtcgacggtaccgccgtccggcttctcaggaggagaatggcctgccgtaaagacgatctgattcttctgattgagaattttgatataaagctcagggctcaagacgttcatgatatttttcagataatcgacgcggatcgaagcgagcagaaaatttgttgttctcccttcgctgtcaaagaccggagtaaaaatattcagctccagcccgtccgacactgtatgtatatcgtctgtgatcacggatttctttgatttttccgctttttgcagaatgctcttgtaagaaagcgcctttttttctttggcgggagacgtgctcaccatgacatcgccgtcttcatttaaaaggtataaagccgaaaaacgcggttcttttttatacgtttccgtcaggattcgtttgatatgctgctcattaacagggtggttgagggccgtggcaagggagctgagccttgcttctgtttcgccgatcaggtaattgatttggttgcggtgaatattgagcatgagagtcgcagtctgacggtgcttttcagtgatattttctcgttcttgttcgtatacaaaaaagcttataatgaaggcggggatcatcaccaagatcaaataaagcctgattttcttccatatacttttcaaattgcgcatgtttttactctctcccaatcgatacaggaatagaggtattatatcactagtgagagccgatttatagaaaagataaccaataccgtgaaaataggacacaatgccggggaatttccggatatatctatttgctgttcaattcctactcatcataacatggtttgaatgttaacagttgacattttcctcatagtttattaatgttttcctgtagttgtttctttggagatgagtgatatgagtaatagagaacaggaacagtccttgaagttatttattgtattatctcgagcgtacagatccattaatgatcatatgaataaacatattcatcatcatggtctgaatccaaccgagtttgccgttttagaactcctctatcataaaggggatcagccccttcagcaaataggggataagattcttctggcgagcgggagtattacatatgtggttgacaagcttgagcaaaagcagctgatcacgagaagagcctgtacgacagaccgcagggtgacctatgcgcaaattacagataaaggcaccgagctcctcgagaagatttttccaggtcatgcagaagagctgcacaacatgatcagcgtattaagcgatgaggagaaagaagcctgcatcgaaatgctgaaaaaagtcggactgaatgcaagaaatatttataagggcaaagagtaaggaagctgccaaaagacagcttccttattcttttttattcagattttcctggccgatcggcaggataaggatttcaacgcgtctgttttttcttcttccttcttcggtgtcatttgaagcgatcggtttaaattccccgtagcctttcgcgctgaagatcttggcgtcaagctttggattttcgattaaaagccccatgaaattgacagcccgcatcacgcttaaatgccaatttgatttaaattgagaatttcgaatcggcacattgtccgtatgcccgctgattacgatattgcggggcgggttcaatacgagaaggtcggatacttccttggccagcggaatgtcctgctggcggatctccgcttttccggaatcgaaaaagatattatcctcgatggaaaggaggaggccctcgtctgtcagcttcgtattgacctgtttttgaagattcttctctttaataaaccggttgacctgctcctgaatttttttcagcgactgcttgtctttttctttttgagcttcggagagatcttttgcctggtcagggctttttccatcttcggttgtgctcgttttcggctcggtgaagctggaataatccatcattcctgttccgccggtaaatacggcattaaatgattttgacagcatatcgaacttcttggcgtcgatcgagctcatggcaaacagtacgatgaacagggccaaaagcagtgtcagcaagtctgcatatgggatgagccaagactcatccacgtgttcttcatggtcttttttgtgcttcttttttctagccattgctgctgtcccctttgtctccatctgggatgacgatgctggagcgttcgcttggagaaacgtacatcaaaagcttttgttcaatgacttttggagcctggccttccaagatcgaaaggatgccttcaatcataacttcgcggactttgacttcctgtttggatttccgctttaatttattggcaaaaggatgccatagtacatatccggtgaagatcccgagaagggtggcgacaaaggcggcgctgatcgcatgtccaagcgcttctgtgtcgctcatatccgcaagtgcggcgatcagtccgacaacagcgcccaaaacgccgagtgtcggcgcatatgtgcctgcctgggtaaaaatacccgctccgacttgatgcctttcttccattgcttcaacttcttcagttaaaacgtccctgataaaatcggcactttgaccgtcaaccgccatgctcatgccgtttttcaaaaattcatcatcgatctcattcaaatttgcttccaaagcgagaagtccttcgcgtcttgcgatttgcgcccactcggaaaacatcgggatcagttcgttgatttcgatcatcttcttctctttgaacaagatgccgaagagtttgggaacctttttgagctcgcggattggaaaagcgatcacaactgctgcgattgtcccgacaaggatgatcagccatgccgcgggattgacgagaacggaagggctgacacctttcatgaccatgccgacacctactccgatgatagctaagatgattccaattaacgatgttttgtccattttttcaccaattcctttaactaacttttctatcgttaatatcggtgttgcgtgataggaactttaggctgtttcttaaattgttgcaaaatcatggtgaaaagggactttagggttatttaatgttaaaaaatagaacttttgtgattcttatgttgtatgtaaaacgacctccgcgatcggaggccgttgtgtgtgttatctggttgttttcacccggatttcatcgttttcaacgataaccgcaaaacctttgatgtgttcttcttcaagcagcagatcggtcatttgatcttcgaccgctgtttgaatggttcttcttaatgggcgggcgccaaaggccggatggtatccgatttcagcgattttttcttttgcctcatctgaaacttcgagcgtcatgttttgctcttttaacgtttcttcaagctctttcagcaagagggcggcgatcttgaccagatcttctttttcgagcggctggaattcgatgatgctgtcaaatctgttcaggaattccggcttaaagtagccgcttaatgaatcgatcattgattgttcgcccattacttgctcttcccggttaaaaccgacggttgtccgcttttcagatacaccggcattgcttgtcataataatgacggtatctttaaagctgaccgtccgcccttggctgtctgtcagacgtccgtcttccatgatttgcaggaacatgtgctggacatcgggatgggctttttcgatttcatcgagcaaaacgatgctgtacgggttcctccggactttttcggtaagctgtccggcttcttcgtggccgacatatccaggaggtgaaccgatcagctttgatacggcgtgtttttccatgtattcgctcatatcgaggcggatgatggcatccttcgtgccgaacagttcttccgcaagccttttagaaagttctgttttaccgacacctgtcgggccgacgaacaggaatgaaccgacaggcctgttttttgatttcaggccggcgcggcttcttctgacggcttttgccacttttttcaccgcttctttttgaccgatcacgcggcttgaaaggtttgcttcaagctctttcattttcttctgatcgtcgtgctgaagcttgccgaccggaatgccggttttttgttcgatgatcgcttgaatgtcttccgcttcaactgttgcccgtttttcttcctcatggctttccatttttttatgcagcgcttcttcttcgtcgcggagttttgctgcaagctcgtagttttcttcttgaagcgctttggctttttccgcttcgatttcttgcaggcgttgggaagcttgttcaccgctgaccgtgtcgattttcaagttcgcttttgaaccggcttcatccaaaaggtcgatcgccttatcgggaagatggcggtcctgaatatagcggcttgacagaatgacgcaggctttgatcgcttcatccgagtaagtcacatcgtgatatgcttcgtatttttccttgagaccgtttaaaatcgctgcggcctgctcaattgtcggttcgtgcaccatgatcggctggaagcgccgctctaacgccgcatctttttcaatttggcgatattccttcaacgtcgtagcgccgataacttgcagctcgcctctggcaagtgcaggttttaaaatgttgcccgcatccatggagccttctgcagagccggccccgacaagaaggtgaatttcgtcaataaacaagattgcgtttttgcgttctttcagctctttcatcagctgtttcattctttcttcaaattgccctctgatgccggtgtttgccacgagggaagcgacatcaagcaggtagagctctttgtttttcaatttatttggaacatcgccttcggcgattttgagagcaagtccttcagcgacggctgttttaccgacgcccggttcaccgattaagaccggattgtttttatttctgcggtttaagatctcgatcacacgggctacttcatcatcgcggccgatcaccggatcgatcaagccggtctttgctgcatttgttaaattgacggcaagttcatcgagcaagccttttttggcagcggtttgcgtctgcgcttgtgatggctggctgaagaaagaacctccgccgccaaaaaagtgatttcctgaaaacatagaaggctgagtcagctctttatagcagtcttcacataaatccatttgtttttttgtaaagttgatttgcatgtttaggcgaatcgtcgcctcatttttttgacaatgttgacaacgcatttgccaaaaccccctttattgaatttgaccttttttgaccaattgacttagaaaaaatggtctgcagtttgaccatttctgactattagtatacattgaccttctttgactttcaagttctatgctttttcctttttgttcctggatgacctggatgagaagttgtccttctttttgaaggacatggatcatatggtgtagaaagggaattcgcttacggaggagtcgtatgagtcaatcacaaggatcagcctttcagctggcatttgtttatgtaggaacggttgtcggagccggatttgcaactggaagagaaatcgtcgagttttttttaagattcggctggccgggattggccggaattttgatcagcggactgatgtttacgtttctcggtgcaaaaatgatgctgattgcggtcagaatcaatgccaagtcttatcaggagctgaataaatatttattcggccatacgcttgggaaatttgtcaatgtcttcatgctcgtggttttgctcggcgtgacgtccgtcatgctgtccggagcgggggcgatatttgaagaacagctcggcttttcaaaccaagcggggatgattgcgacgattgccttgagtctgtttgtcatgatgaagggcgttaaagggatattcggcgtcaatgtcattgtcgttccgctgctgcttctgttcacagttgtcgtcctgtttgactcgtttattttcagagggccggagatacacaatttggcggcattttcggcaaaccccgattggattttatccgctgtctcgtacggcgcttttaatttgtcgctcgcacaggctgttctcgtgccgatcgcttctgaactgaaatccgaacgcctgattataaaaggagcattaatcggaggggttctgcttacccttgtgttggtcgcaagctttctgtctctttcaacattgcctgatgcccttttatatgaagtcccgatggcacaggtcgtattcatagtccagcattctgtccatatcatctatctgtttatcattttcggggaagtcttcacatcagtcatcggcaatttatacggtcttgaaaagcagattaatgaatatattcatataaaaagcctgtatgtgtttatcttcatcctgctgacaatctacttgacgggacaaatcggctacggaaagctgatatcgaccatttatcctttgttcggccagctgagcctcgtctttattttctttctgatcgtcaaaagggtgcctgagcgatgactggcaggcattgcacttggcgaaacgtgcgatttgtgataagatggcgaaggaaaattgaaataaaatccgcttgaaactgcgggagaggttctagcaaaaccctctataaaaaactaaggaaagctgtatccttggggtatggccttttttattgtttttttgctagagcacctttctcacagagaaaggtgttttttcgtttagatatcattgaatctcttcttttatgaaatggtgacgaaaagcggagaaggaggaactatgaaacaggaaaaagcgatcgtcgtattcagcggcggtcaggacagtacgacttgcctattgtgggcgcttcggcaatttcaggaggtggaggcggtcacgtttcaatataatcagcggcacaagcaggaaatcgaagtcgcgaaaaagatcgctgcaaagcttggcgtcaagcatcaccttcttgatatggaactgttaaatcagctcgcgccgaatgctttgacaagggatgatatcgagattgaggcgaaagaaggcgagcttccgtccacttttgttccgggacgcaacctcgtgtttttatcgttcgcttcgatcctggcctaccaggtcggcgcgcggcacatcattacaggcgtatgcgagacagacttcagcgggtatccggattgccgtgatgagttcgtcaaatcctgcaatgtcactgtcaacttggcgatggagcgcccgtttgtcatccatacgccgcttatgtggctgaacaaggcggaaacgtgggagctcgccgatgagcttgatgcgcttgatttcgtgaaaaacgagacgctgacgtgctacaacggaatcattgccgacggctgcggcgaatgcccggcctgcaagcttcgcgcaaacggctacaatgaatatatgaaaatgaaaaaggagcgagcttaacagtgcttacacaaatttatccgcaaccaagccatccttactcttttgaattaaataaagatatgcaaatgtcagctgcacattttattccgagagaggatgcaggcgcatgcagcagagtccatgggcatacgtatacaatcaatattacgattgccggggatgagttgaatgcatcaggtttccttgtcaacttcagcaccattaaaaaattgatccacggagaatacgatcatacgcttttaaatgatcatcaggaattttcaggtgaaagcgcggatcggatcccttcgacagaagtcgtggccaaaacgatttacgataaagtagaggcttatttgaaagatctcaacaaccgtccgcattgcgtccaggtgtttgtcagggaaacgccgacaagctatgtcgtgtaccgtccgaaaccgggtgttcagcatggctaagccgattcccgtacttgaaattttcggtccgacggttcagggagaggggatggtcatcggccaaaagacgatgtttgtcagaacagccggctgtgactattcgtgcagctggtgcgattcagcttttacctgggacggttcggcgaaaaaagacatcaaatggatgaccgcggaagaagtgtacgaatctcttaaagacatcggcggaaacgcattctcgcacgttacgatttcaggaggcaacccggcgcttttaaaacagctggacggactgatttcccttttaaaagaaaacggtatacggacagcgcttgagacgcaaggaacgttttatcaagactggtttaccggaatcgatgatttaacaatttcgccaaagccgccgagctccaatatgaaaaccgattttaacaggcttgatcatattgttgacaggctgaaggaacacggccgggcggctgcggcaagtttgaaggtcgtcattttcacggcggacgaccttcaatttgcaaaacaagttcaccagcgttatcccgatatcccgttttttcttcaggtcggaaatgatgacgttcatacagaagaccaagagcggctcgtcgaacggctgctccaaaaatatgaacagctggtagaagcggtcacgcgcgaccctgaattgaaccgcgtccgcgttctcccgcagctccacaccctgatctggggaaacaaacggggtgtttgatttaagaaaggaagatgaatgatgacgacaagaaaagattcagaactggaaggcgtaacccttcttggaaatcaaggcaccaattatttgtttgactattctccggaagtgcttgagtctttcccgaataaacacgaaaacagggactatttcgtgaaattcaactgccctgaattcacatcgctgtgcccgaaaaccggacagcccgattttgccacgatctacatcagctacatccctgataaaaaaatggtagaaagcaagtctttgaaactgtatctcttcagtttccgaaaccacggcgattttcacgaagactgcatgaacatcatcatgaacgatttaattgagctgatggacccgcgctacatcgaagtctggggcaaattcacgccgaggggcggaatctcgatcgacccgtacaccaactacggcaagcccggcacaaagtatgaaaaaatggccgagtatcggatgatgaaccatgatctgtatccggagacgattgataatcggtgatgatgcgggcagatgaagcgaaggtttgtgatcgatgtgtgaccgagacgcgtactgttacgcgtcttttttgttcgaaatttccacgaacaattaccaagcgtattggtcgaatgctagtccgggtatatgaaatacgattcgaattgttaattgaaaggtaaagaggaggaaacttcgtcgtcactcgcctcgttaacgtctccgcttgacagttcgtcgttaactgcgaatgctctagcgttcggtatttagatggtttccgtctgtttttagtcttgtttgttcatttattcgtgaaaaaatgtagctttgtcctcatgttacaaaggatgttttctgttttttctttaaacataaaaatctagttattctgactttgaggaggggatgggaggtatatagcagagacgaagacatagtgccaagagcatgtcttattcgtatacacacaaatatgtaacgcgaagatgttggagggcttacgaaagaaacaatcgatcgttatagacgggaggagcgttgaagaatttgtggaggcttttaaaggaaggttggcactgagtcggaatggtatacgttaatcttaccgacagctgataagaagttaatcacgatgtttaacgttaagaaaccgtagaaataaaaagcgccccacatttggggcgtttcttacgtttgcttacgggtagcgatttgatatacgccgtcagactggtcggttgctgaaacaacgctaatacccatcgttaataacgcggcggctaaaatgggaataacgagctttttaatactcatagagacactccccttttttaatttttgtttgcccatacatcattttttgaaggaactcgattgagtttctatggtcttttctttcaaggtattggttagagacttcaagcgaaagctcttctatgtatgcaaatattttattctcctccaagtatttaaatacctctaaaatctcttctttattcacagaatagatatataacgcctcaagatattcaaatagagaagtgaatagggtatcgttgaattttcgagctgtttgtctaaccaataagaaatatctcgattgcgcgctcgtagtttttctgcttaaaaagaagttgagtagagtaatataatgattgtggtaggttgttatattcttcttttagattaatctctacggctttttcagcatattcaactgctgcatcaatgtctcccatacattcatgacagtcggctatattaaaataggcagaactaatgagccttttattgtcgatctctatcgctaattcaagtgcattttccaggtggggtaaggctttgtcatggcgcattaaatcgtcatagttacccgcgataacaaataaacattggattttacggactgtgtagagttcatgattattgtatattttaaaggcccttaatatatgatacatgtgtctgtttcatgatgtagtatgcttcagccattttaaagtgaaactcggcttgttctataacatcgtaatgagagccaactgtttttctgcgtttcgataaaactctattgctttgatgtactgttttttctcaaattcatacatgcccctaaagaaaaatgagtagtaactaaggaggccatttaaatctcttcgaggctcctcgatttgggccaacaatttgtttattgattgtccttgttttcttttgttagtaggttctaaatattctaacattaattgatgtctaaaacacatcaactgatagtaaaggagtaagtcctgatcttcttccatttgattaatttccttctctacttcttcttttaaagcctctgcatccggtacgctaaactctcttatcattttataccattcgtggattttcactccgacttttgacgagggtattaactgtttcacttccgcctatacctttttatttcatttttgtaaatatattactataattcgggtgataataggttgaaaagtgaaaaaattttcggtatgccgcaataaaatcagcaacaaaaagacgcctgctaagacgcctgaatctctatatgctctttttcaagccgcacctgcagtattctcgaagggaaatttcgtccaccgcgatcttgaagggtttactatttgaaggaatttgcggataaaccctgtgcatccatgaaaatgaaacttggcctaataaagaagtaattcgatttgtgaatgatcaacttaaagaaaatattgatcttttattgatgcctgcaacagcttccacagctcctcgaaacccttttaaaataaagagttataaaaattgaccagcatccactctagtggaatctttccccttcacctgttttaacgtggctacgattagaaagctgacaatcactaataagagccatgaactcactttccctacatgaacgagactccacgtactggtttggtttggatatgtccaggccccaaaaaacgttgcgatattttcggctatccatataaaaaatccgatgagcacaaaagaaagtgcgagcggcatacggtaacgaatcccattaacctcgtatatgacccatgatttccaaaagacaattatcacaagtccagataaccaaaagcggacgtcaatccaaaaatgatggaggaaaaaatttaaataaatcgcagcggccagcggtacaacgacgtaaaacggcggccacttaaccagttcaaccttgagcctcctccaagcctggcaaagataactggctacacttgcgtacataaagccgctatacaaaggcaccccaaagattttggagtaaccttcctccggataagaccaggagcccatttgcaccttgaaaagctcaagagcaagtccaataatgtggaacaatgtgattacttttaattcatcccgtgtttcaagaccggaacgcaccatccaccattgcatgagaacacagatgatgagcagcaagtcataccgcggcaggaagggaagaggtatgatttgtgtaacagccaaagaggcaaaaataacgacaggaaatacacatgacaaggactgctcccaaccaaaacgaacgagttgttttagtgctctcatgatgtgtgcctccgaagtttttttctgaatatatgcgaggccagcttagtatagcagctaaaccggcttacaggtatgcgcataggatcaccgccaaaaaaatggtttctttccatattaaatacttttttaatcctgggtgtcttcatcacttcggtattccaaaatatctccgggctgacattctaacgccttacaaattgcctctaaagttgataatcgaatggcctttgcctttccatttttcaatatagaaagattcgccattgtgattccaaccttctcagaaagttctgttacactcattttccttttagccagcatcacatcgatattgattataattgccattgttatcacctcagactgttaaatcattttctgattttatatcaatcgcttcttgcaatagcctttggagaacagcggcaaagactgcgataaccattgaagcaaaaataaggaccaacccgatcagtatgatccctggagcgtcgtccatctctgcgataagatagaagagcggcatgcctgccgcaaataaaatactgatggtgattgcacagtattttatattctttaaagcccgtacagataattctgagaaagctttattctggtcaatatagcttaaaagtttaaaggcttgatacagagcaaaataaaaaggtatcgccgctgcatacaaatcggcatatacgagatatttcaaataagaaatacccggatacaattcggctgcaaaattcgctatttccggcacaaaaaatatgcacaaagcaagaactgggattccaataagaataacagctatctttaaaaagagagttgatccccgtttcattaaaagcacctcacttatttttgtcgatttgaatttaacacattatttatcgttttacaataaaaatatattgaaattgatgattttattattgttatggactgatcttttgatttttagacaagatggcgttacttgcggaaacaaagccgacacgtctgcagagtacacacacatcttgcagacctctacggcttccgcttatatgcaaataaaagccctaaatatgttaagcgcgtactgaatcctacagatcgtcgaggagtgaaaaagaatcgatttttcccaaacatattttgaatttataatagaatagctttaaaggaatatgtatcaacaagtcgtctagcatatgttgtgttataaaataaaacagctggcgattggcgtgtctttccttttaacgtgaatagtcgaggagttatttgaggtgaagcagaagacgctgacgcatgatcgacgtctttttattgtggtaaacacagagcagagagtcttgttagattaaattaaaataagacgccaattaaggcgccttcatcttgtcttaaatccattcacaaaactttctccatccttctctgtcgcaataagctgctgggcgctttgactgattcgctgagcaagcgcctgctgcgcttttccttcgaagctgtagagaagcgatgaataaacgctgttcatttctttttgtatatcgtctattttaaacttcggtcttagcgtcgttttaatgccttcaagcttagttgcggctgttaccctcatgcccgttttcagcatttgaagctgattgcgccgtatgaagagggtagcttcttgatctcagtttaagttgttgagtgaagccagtctgttgaaattttccattgtttcatctcctaaagtttaagccaatttgccagcattttatctttcgatttaaaatcttttgcaatctgcgccaggtatccgctgatgtcttctaaatctgaaatcgtgtcctttaatgaggcgatgtaagctttttcggcatgaacatcgtaaaatagcggattgccttttttgtcaaacgactgcgccaggtttttcagcgtattgtttacatcctcgagtgtcagcttgtcgtataaaccgtggccgacttgacggtaggtatcgtgcttcaggtcgttgatctcggcgtcgtgttcctgataagcgttttcggcttcccgtttcatcgtccgcaagcatttactttttgcgcgagctgcttggcaacttcgggcgttactttaattgcgccacttccggatgcaacttccggtggaagcatcgcttttaaatttttgtcataaacgagttcatcgccctctatattttgaacgttgccgttttcgtcgaaggtaaagttgcctttgttgaggccgtgtgtatccggcattcccattgctgtggtagcaatgtagtctacagcgacattaaacactgtgccaaatataccgccgttatacttcggatctagtcgtatttgtcgttccacacgcgaagtagaggggtctttggtatatattgttctgcctgcgtgtcgttcgtactcattccaccagccggaaccagtcatatcatccggattgacaatcgcttttacagacgagtcatatttgccgcttcggatctccttttgcttttcttcagaatgcaatttaacgacggaaggattgttgaatgcgactgcgtatatatcattgttcacagcgctgtattcagcctctgcgccgccaagagagtgtccggtggttgaaataaccgtcgaggtgcctttatacttttgtttaacttcccgtaccagatcatcagcttgcccgatttgggacgttttcgtaattaatttgtatttaccggtgctaagcatcgcgtcttgtgagggggttgcgttgtattttcctattgtttttgatgtatccttcgcatctttttcgattatgtattgcgatttctttttcggatcaagacccataacaacgttaccgccgtctgcatcaataacatcttgaaaaaactgttctttaggatttgttccagcgaaggccacgacgacgttttctggtgcgttaggtttaacccatttaccgtcctttttctttgcttgaacaaaaacatacgcatcaagtccagtgtcagagtcccttttaattttatcaacaaaaaaagccttatttgatttactctctataggtgttctttccttgaatgcttctttcattttatcggtactatatgtgttttggctaagaaaataatactctttatctgttaatttaggaatatcgctctttttattcaggtacataaccccgcaaactatgtaaaatgtaacgtggaaaggatggttttatgaaaaaatacataattatccttcttgctctggtcattataacatctggaggaatatttatgaagcaacaaaataataacagagaaaaagaagagctttataatttagctaaggaaagaatgacagactttattaaaacgaattataaggacattaagtcaattgattattatgatgactacgaagtgaatccaatgggcggaattgatattaaagggtatctaaatgatgataagaaaaagaaaatatggggtatttacgataaggcaaatgacgaagttgggtccttcacagtcgatgctgaaagaaagcccgaatataaagataaaatttgcgattattaataaaaggcccgactcgattgagcgggcttttttctattttcatctctcgtttgtttaactaatcggtttttattaccccttttaggcctcctcaacataaaatagttcttcagtaggcacgtttaatcctctaaaatggataaattgcagttttgggcatttttttcacctagaacgaaagaacttaatgatgcgaattttattagttctattgtcctgttttatatattgagtaccaaaaatgcactccatatgttttataatgaagcgggcctaacaatcagcaaacatggagcggaatgcaataaaatcgtataagggcatgcagtatgaactggaggatacatttttgaaatataaaaaagcagcagcacttggaattggtttacttttatttataggcggatgtcagaagagcggggaagctgaaatcagcgtccaagattacacaggacaggattttcatattcatagtagaggttatcagaaggaaaccgctgagatcgcagaagcgcatcgagatgaagttgaaaaaacggtaaaagattattttttggatcaatatagaacgaaggtaaaagtccataacattgtcggagggcatgggtttgttactgtgtatgccgaatcagtcggaaacttgcatttctacacaagcgcaaaaattgaaattgatttggacaagaaagaggtgcaggctgacgcgatcagctcatcggagtgggacgtaaaagactcgattacaagcgcgatatatgcgttggcttttgaagacgaatttgccgctctagattactatttagagaagctggcagaagaagagccggttgtaggtaaaacgcaggcagccgttgataacacaagcggtatgggatatcagacgccttattatgctgtttctttaaatgctgattggaaggatgacctttattcagcctatttagaaaacccaaaaagaagcaaaaaagactggcaagagaaattggaagatgaagaaatcaccccaaaatcatgtgatatcaatatacggttatatatgaaaaaaccaaatacaagaccggacgagcgcatttataatcaagttgtccaggatatcgaggacatggaagagctggccccggggacttacaccatttacttgagtgacaatagaatcaacaaaaacctaggatataattcaagaaaaagcacgcttggccgataaggtcttcctaaccgataaagagattggaaaccgatcaattttctgtatggatatgagcgggaaagaaaaagtggagatttcatcatctattttgaaaaataatgtcctggggaaccgttcgggtgtttcatttcgcacagtcgccgttttttcagctgtccaatcaaaaatcgattaaggcgctgtgcgatgcttcaaaagacatcctgaacatatcaaacttcttcgggatgatgcaggggacagaggaaaaaaccgccggaccaaggtggcaggcggttttccttttgtagaaaaacttgtggaaataaagcttcgtggaaatcgtgaattttttgctgtgaagggcggctgattaatgcagggagtctttaataattttatagtttttatgattgacgacggttaaggagtccagttccaagtctctgtagttttccataatcgtgacatcgacgatcacagagttttcgtttactttttctacgattccggtgagtccgtttttaaattcgatgacattcccgacttttgcaattttcaagtgacttcctctcctttaaagtaaattaacctattgaaagtattttgcaatattttcttggagaagtaaagcgatttgggaagcggcatcactattgttgtacccggtgtgacttaatgatatagttaattagttaaagatgatgagagaaaaggggagagaaaagttgacagagcaaaatgccatcgatcagatcgagcaattaaggtcagggagcattcatgagctccgtgtgaaaaaagaggattttctttctttcagagccatcttaacaaagcaggaagattttaagcattttcgcggcattgcccagcatggcggagatattatatttcaatatatgaaagaggcaagaagctgaaaaaagctttctcagacaggctgagaaagctttttttatttgtgtgaagccatatgtttctggagattttggtgttttttgcatgaaatccgccggctgtctgcaataatgtgacagccgaacggtttgatggaagtcatgccaacattttggcaatgaaatcggcgaatcgtcttgttactgtaaaacatatgtttttttcgatgaagatttgacaaggaggaaggaaatgaaatcgaaatttgctgctctagctgcgtttttaatctgcatgctgccggcggcaagaatcgagcatgctcaagctgtcatgttgttctcgaaaaaagataaacaggaaatggaacggctgatggaaagccttaaacaagaagaaaatcctgctttttcccaattgacagatgagaaaagcttcattgaagccgcgcatctgtcagctgaagaggaggaggaaatagaagaagctgaagaagagacgactgatcttacacataaagaaaaagatcttttatcaaggcttgtacacgccgaagcgaaaggcgagtcatttgaaggaaaagtggctgtcgccaatgtcgtcctgaatcgggtgaaagacagccgatttcctgacagcgtaaaaagcgtgatctatcaaagaaacgcttttgagcccgttctaaacggcagcatcgagaaaaaagcagaccgcgaatcagtggaagctgtggaagaagcggtagatcaaaataaaaaagaaacagaagctttatttttctataatcccgacatcgcttctgatgactggattaaaacgagaaaagtcgtgaagcgcatcggcaatcatgtctttgcgatctagaaagcagtcagggccattcgccttggctgctttttttgtgcgattctttcttacgcattatcatctttcacagcccaagaaaaaatttatttttgatactttatgaaaatcaattttcaattaaaaagaaaataatttttagacttgtctcatatgatgggataaacccgtgagacaaggagagacctcatgaaccgttttgtaaaaggaatcgttcttctttcgctagctgctttttttgcagaatgtcttgaattcgtcatcaacatgattcttgcacgggagcttggcgagcatggcatggggctctacatgagtgttttgccttccatttttttggtcgtggtgattgcgagccttgagctgcccgtatcaatatcgaagtttatcgccgagtccaacccgaagctgcacgaaagcatgctgaaacatgcattgcggatgactgcggtctgcacggttttctccacggcagccgcagtgatcattcttccatttattccggtttttgattcttaccaccctctaatcagaggacttgtgatcgggatgattcctacggttgcattcacatcgatcgcgagaggctacttcatgggcgttcagcaaatgggtaaaatcgcaacggcgaatgccttgaaaaaaatctttcagctcatcggcttgtttttattttttcaatggtattcctttgaattggatacttctcttctcatttcattgtttgtcctcgttgcaagtgaagtggtcgtgtttgtttatttgttttcgcagtttgttttggtcaggcgtgccgctcaaaaagggcagcagatccacttgcggagaaacgatgttttaaaacgcctgctcactgtttcgatcccgacgacggggctgcgcgtgtttcatgctgtgacaaatgccgtcgaaccttttttggtgaaggggacgctgcttgccgctggcgtatcaagaacatcggccatcgaccagttcggcatgctttcgggagttgcgatgacaatcggcttttttccggcttttatcgcccattcactgatggtcgtcatgatcccgagcatttctgaaagctacgcttacgggcaatacgaaagagtgatcaaacggattaaacaggcgatctttattacgctgttttacggcataccgtccgtcatggtgatgtatcactttgcagagccgctgacccatttatttttcgattcggtcaaggcgtcgttttaccttaaaatgttgtggccgtattttttattccacttttttgcgatgccttttcaggcctgtttaatcggaatggggttggccaaagatgctttttatcataacgtttgggccagtgtcttatcgtttttgatgatgtatgttctcgggtccatgcagactttgcagatgacggggatcattcttgcgatgaataccggtatgattttgctgacggcgctgcattatgtgacgatttgcaaggagctgggcgtcacgctttttttgacaaacaaatcccgatctccgagaattgaaagccgctgatggatcctcttcatagttttagcttttgcggggaagctaatattaaaaaagaaggggagttcccatgcgaagaatcagtctcatttacccgctcatcctgctgttttttaccgggttattcgtatttcagccgcaggcatctgcaaaacaagcttcgccggcagtcatgcagatgaacacggtcgaaggtcagcgcgtcgtcattcccgccgaaggccagaagacgatcgttcatttttggacgacctggtgcccgccatgccgtgaagagcttccgcgattccaatcctactatgaaagcaagcaatccggcgtcaagctcgtgaccgttaatttactgaatgccgaaaagaacgaacagaaggtaaaacagtttattaaagcaaacaagctgacatttccgatcgtttttgacaaaaagggtgagatgatgaaagcatataaagtcatgacaattcctacgacttttttctttaatgaaaaaggagagctggagaaaacgtttgtcggccccattactgtagaacagatgaaggaatgggcagggaaaagctgagccgggagttcagctttttttaaaatgtaaatgataattaatatcataaagaaattataataattattatttgaaaacgtaggatgtcgtgctataatgagaaatagaaaagggtgtgtccaatggacaagtagcagtcataccctttatataaataaaatacttaatgtttatgctgccgatgaggcggcaatttgttttttaagaaggaaattgacgatgaattacattctcaattagggaggatattggagatgcaattagagatcgggaagcaatcgcagcaaaaccgtcacacgttgcaatttgaaaattggaggcagcacggggaattgatagctgcgcttttgtcgggtttgttgattcttgcaggctggctgttgtccggcaatgaaacattgtccgttgttctgtttattttagctttttgtatcggcggctttgctaaagcgaaagaaggtatacaagaaacgctgtcggaaaaaacgctgaatgttgaactcttgatgatttttgcggcggtcgggtctgcgctgatcggctactgggctgaaggggccgtgttaatttttatcttttctctcagcggagcgcttgaaacgtatacattaaataaaagcaaacgcgatttgacttcactgatgaaattggagccggaggaagccgttttgcttgaaaaagaaggaacaagaaccgtggcggcagccgatcttcaggcgggcgacctcattcttgtgaagcctggagaacgcattgcggcagacggagaaatcgaaaccggaaaaacgagtatcgacgaatcggctctaacgggcgaatccatcccagccgaaaaaacactcggagacgcggtttttgcgggtacggtcaatttgagcggatcgctcacggtccgtgtcacaaaggcaaatgaagattcgttgttcaaaaagatcattcggctcgttgagtctgcgcaaaacagcgtttcaccgtcgcaggcgttcattgagcgatttgaaaatatttacgttaaaggggttttgcttgctgtcggactgctgctctttctgccgcattttttgcttggctggagctggagcgagacattttacagagcgatggtgttcatggtcgtcgcttcgccgtgcgcccttgtcgcttcaatcatgcctgccgcgctgtcgctgatatcaaatggcgcaagaaacggcctgcttgtcaaaggcagcgtctttcttgaaaagcttggcaacagcaaaatcgttgcattggataaaacgggaacgattacgaacggaaagcccggcgtggaggatatgcttttagctgcagatatcgaggagcgcgaatgcttggaggctgctgctgcgattgagaagcagtcaggccatccgcttgccaaagcgattgtcgagtatgcagaagcaaaaggcatcaagccggccgcgaatgtgtcgattgaggagacgtcagggtttggcgttcaggctcgatacaatggagagacatggctgatcggcaaagccggatttgtcggggaagaggcagccgggcaatttctcacggcggctgttcaggagcttgccaagcagggaaaaacaattgtgttcatgaaaaaaggcgaaaaaatcgcggggtgttttgcattaaaagaccaaatcagaccggaagcaaaagcggtggtcgaagagctgaacgcgcttggcgttcagacggcgatgctgacaggggaccagcctgaaaccgcagcggccatcgcacgagaagcgggcttgaaaatcgtcgtttcagaatgccttcctgacagaaaagtagaggaagcgaaaaagctgaaaaaaacatacggaacaatcgttatggtgggagacggaatcaatgatgcaccggccctagccgccgctgatgtggggatcgcaatggggggaggaacagatgtcgcactggaaacggctgacgtcgttttaatgaaaaacgaattgacaggactgaccaaaatgattcggctctcccggaaaatgaatacgatcattaaacaaaacgtcattttctcgcttgctgtgatctgtcttttaatctgcagcaactttcttcaaattcttgatctgccgctcggtgtcatcgggcatgaaggcagcacgctgcttgtgattttaaacggtctcagactgctgaaatcctaagcaaagaaacggctgcatgctaacggcagccgtttttcacatcagagggcagtttgaggaagaggcggcaataatagaagcgggcggcacccccacaatacataagcggtgagcaagagacgggaaaaactgatacaatggatgtgatgcttttacattttacatgtatggtacggaaactgtctcaaggagtgaacagagcatggaaagaattgaacaaatctcttcctggctgaaagaaaaaaacatatcttcggcttttattcattcaaaagaaaacgtattttatcttaccggcttttatacagaaccgcatgaacggctgatgggcgtttttatttttcaagatgaagagccgttttttgtttgtccgcaaatggaggccggtcaggcgagagcagccggctgggcgtatgagatcatcggatacggggatcatcaaaacccttgggaactcatatcctcagcgcttcaaaagcgaaacggccaatgtttaaaagtggcggttgaaaaagaaacgcttgctctttcgcgcgccgaaatgctgcaggcggtcacaaacggtgcggagcttgtctctgcagaagaaaggctgaaccaaatccgcgtcatcaaagacgaaaaagaaatcagcatcctccgcgaagcggccaagcttgccgattacggggtcgaagcaggagccgccgcattaaaagaggggatagcggaaatcgatgtcgtcgctaaaatcgagtatgagctgaagaaaaaaggagtccaggggatgtcgttttccacaatggtcctttttggagaaaaatcgggacagccgcacggaaaccccggcagccggacgctcaagccgggcgatttcgtcctctttgatttaggtgtaatcattgacggatactgctctgatattacaaggacgctcgtgtatcaaaatgtgagcgaaaaacaaaaagaaatatataatacggtgcttcaagccgaaacggaggcgcttaagatgagcaaacccggtgtgagaatcggcgatcttgatttaaaagcgcgcggcatcatcgaaaaagcgggctacggcgattactttccgcaccgcctcgggcacgggctcgggatttcgcctcatgaatacccgtccatgagccataataatgacgaacttttgaaacaaggcatggtatacacgattgaacccggcatctatgtgccggaaatcggaggcgttcgcatcgaggatgatgtacttgttacagccgatggagcagaagcgctgacaaagtatccaaaagagctgactgtcatttcataaaaaaatggaacccgccgtgcgcgggttctattttattacggaagtgaatcttttcatctcaccgtcaatcctttgaaatgaagaaatcgtcaaaggaacggaatggtttgatttcgtgtttttctttgaggggtttcatcgctgcttttgaagacagcacgataacgatacataataggatcagaatgaagatgcccattttccttctcctttctggaatgtaaacgtgttcagcaccggtgctgtcttcattctaaattatgaaacgctttccatatcaagccctaaatcaataaaagaaacttctgatgccaaagggttctggaatattttggaccatcgcttgagtttattggggctgcatgctgccaaaaaagtcctgtgatgatcgtttgatgaatgaatctatgacgcctttttgcttttgttttggtgatttagtttgatcaaaagataatcggattgcatcattattctcatgtgaaaaatttgtatacttagctcagaagaaaggggggattacacgggaaaaacactgataaattactgttttagacaaaatcttttcatctcgcatccagatatttcagtctccgcaacgattgcggaatcacccccaaaacaaataagcattaaggatttttctaatgatttgaagccatccattacctctgaaaggaagctagaaagagtgaaaaaattagggtttgtactgtttatgtcgatgtttgcttttgtcagtgtagtaccggcagctgaggcgaaagtcattgatcatgacaaagtgcaaggcttcagcgaagtgacccctgtgacggtttcccaaaaagcggccaaacgttttcagccttatttgaaggttgcgagcggctgcgtgccttttccggcagttgacgcacaaggcaacacaagcggaggtctggagcctaccggagcgcccgaaggccactgcagcaaaagcgtgggacaagtgtactcacgatccgcatggtataatggagtttgggcgattatgtatgcatggtattttcctaaagattcacctctgcctttaaaagcattcggccatcgacatgattgggaaggtatcgtcgtatggatcgacaatccggcaaatcaaaatccaaaagtgctttccatcgcttattctcaacacggtaaatttcaaaaaacagcgccaaacaacaatattatggaaggcgatcatccgaagatccgctatgatgctcctcaaccgccgatcaaccacagcctatatgtggacagtgcaaagggcggcacccagcctctcatcgggtgggaagatttgacgcctgccgcaagaaacgcattgaacacaacggatttcggaagcgcaaacgttcctttcaatgatcacaatttcacgaataacctagaaaaagcatggtttagataaaaaatatttcgagtatccggctgattgtgaaatattttcatatcagccgatttttttcgccgccttgtacctcttccgaaatcttcttcgctgttttcttcatatcaatagaatcccgaaaaaatggccaaaaggatcaaaatctacggctcaaagcgatataatttctttatgatgaaatgatccggatgtgcgaaaagatttgaatgaaagaagggaaacgaatggcaaatatcagggaaatagctgaagcggcaggggtttccatcaccactgtttcgagggttctcaacggccacccgtatgtcaaagaagaaaagcgtcaaaaagttcttgagacgattgaacgcctcgaatatgcaaggaatatgcatgccgttcatttatccaaaggcttttccaacatgataggcgttgtgctgccgaccatcagccttccttatttcggcgagctgctggaaggaatcgctgaagaagctgcgaaggaaggcgttcacttttcgctttaccaaacaaattatcaattggaaaaagaaatttttgcattggagcagctgaaacaaagacaggtggacggcctgattttctgttcaaaagcgatgtccgatgaagcgcttttggactggcgtgaaaccggcccgttcatcctgtgccaggactcaggcgagcagcactttgcaacggtcagcattccgcataaagaagcattcagacttggattggattttttaattgaaaaagggcacacaaagatcgcgattggtttggcaaggaaaaacggcatgaacagccattttcgcctcaaggcatacaaggaagctttggccgcgatcggggagccttaccgggaagagtgggtatttgagcggtcgctgacaattaccgacgggcaaaaactgttctccgaatggaaagggatggaggagaagccgacggctgtttttgtcgcaaacgaccaagtatcagccggtatttttcttgaagcgcagcggcatcaagtggatattcccggaagcctcgctattttaagctgtgacaaccagccgatcagcgaagtgctcggcatttcaacaattgaaatcaatataaaggaaatggggaagcgcgcgtttcgccttctgcaaaaaagaatcggcggcgccgggccggaaaaactgactgttccttacaagctgatcaaaagggcgactgtgtaatcaaaacatcaatctttttccagacagtgatcaaaattcgacatttttcatcaaaaacgtcaaaataaattgacgcgctttcatgagttttgtacgatatgagagattgatgacaaaaaggagctgaggatcgtgaacagatcctttaccgttgaaaaggtactcaacaacaacgttttaatcgctctccatgatgattacagagaagttgtcttgattggcaaaggaatcggttttggtaaaaaacgcggagatcttatcgaacatgagaactacgaaaaaatgtttatcctggaaaatgataaggaacaatcgcagtataagaagctcctcacttatgtcgatgaaaaaatggttgatatcgccaatgatgtcatctaccatatcgcgcaaaaaatcggccagccgctgaacgaacacattcatgtcgccctgacggaccatatcgcatttgcagttaagcgtctagaaaagggatttgatatgaaaaatccgtttttgcttgagacggaatcgctttatccgaaggaatacgaagtcgccaaggaagccgtcgatatgattaatgaaaaatccgacattcagctgcctgaaggtgaaatcgggttcatcgcgcttcatatccacagtgcgatgacaaaccgcccgctttctgaagtcaatcagcattcacaactgatctccaggcttgtccaggtcatcgaagattcattccagatgcaagtcaacagggaaagcgtgaactatttgcggctgatcaggcacttgcgctttacgattgacaggataaaacgggacgagccgattcaggaaccggaaaaattaatgttgttgttgaaaacggaatatccgctgtgttacaatactgcttggaagatgatcaagatcttgcagcaagcgctcaagaaaccggttcatgaggcagaagccgtttatttgacattgcatttgtaccgtttgactaataaaatttcataacgcctttataacgtgttactgattcgatcaggcatgagtgaaaaaaggggagaaatgaagacgctgtcttttgtttcttagtgtacccgctttcaccatgccttttttgtcgttctaaaggcgaaatgtaaacggtttattcagatgaaaaagcagtcttttgaacgaagttgtcatgaatttttgctgtaaggtcaaactattcttagagggggttaaaaaatgtttaaatcgctatttggcgttctgcaaaaaattggacgagcgctgatgctccctgttgccatcctgccggctgcagggattctgctcgcgcttggtaatgccatgcaaaatccgcagatgacaaaagtcgcaccattcttaacgaacagcaccgttcagcttgttgcgaaagtgatggaaagttcaggtgacgttgtgttcaccaacttggcgctccttttcgctgtcggggttgccatcggtttggctaacggcgacggcgttgccggaatcgctgctattatcggatatcttgttatgaatgtcacgatgagtgcagtgctccttcaaaacggttcaattccaagcgatgcagttgaaagagcacagttctttactcaaaaccatccggaatacacgacaatgctcgggataccgacattggcaacgggagtattcgggggtattattgtcggtgtcctggccgcagccatgtacaatcgattctacacaatcgagcttccgcaatatttaggattctttgccggaaagcgctttgttccgattattacatctatttgtgcattgctgctgggacttgttatgctgtttatctggccgccaattcaaggcgcactgaacagcttttcaacgaacctgcttgcagccaatgaagcggtcgcagctctcatcttcggaatgattgagcgggctctgattccgttcggtctgcaccatattttctactcgccgttctggtatgagttcttcagctatacgaaccaggcgggagaaattgtccgcggtgaccaaagaattttcatggcgcaaatcaaagacggcgtcgaattgacagcgggtacatttatgaccggtaagtatccgttcatgatgttcggtcttcctgcggcagcgcttgccatttatcatgaagcaaaaccgcagaacaaaaagcttgttgccggtattatggggtcagcagccttaacatcattcttaacagggatcactgagccgatcgaattctcattcctgttcgtcgcaccgattctgtttgcgattcactgtgtgtttgccggcctgtcattcatgatgatggacatcttgaatgttaagatcgggatgacgttctccggcggtttgatcgactacttcctgttcggaattctgccgaaccgtacagcttggtggcttgtcattcctgtcggtttagtcctggctgtcatctactacttcggattcagatttgccatccgcaagttcaacttgaaaacgcctggacgcgaagatgcagctgcagaacccgctgatgaaggcaaagaagcagcaggagatcttccttatcaaattcttgaagcgatgggtgaccaggaaaatatcaagcaccttgacgcttgtatcacaagacttcgcgtaacagtcaacgatcagaagaaagttgacaaagagcgcttgaaaaaactcggcgcttccggcgtgctggaagtcggcaataacatccaagcgatattcggaccaagatccgacaatttaaaatcacaaatgcaagacattatgtcaggccggacgcctcgtcctgaaaaagcgccgaacgctgccgaggaagtggagcagcaaatcgaagaagctatggttgagcctcttcaaaacgaatcaggtgaagaagtattcgtttcaccgcttgcgggtgaacttcatccgattgcagatgttccggaccaagtattctccggaaaaatgatgggtgacggatttgcgattcttcctgcagaaggcacagttgtgtcacctgtaagagggaaagtgctgaacgtgttcccgacaaagcatgcgatcggtctgcagtctgacggcggcagagaaattctgatccactttggaatcgacacagtcagtctgaaaggagaaggcttcacttcatttgtttctgaaggtgacagggttgagcctggccagaaactgcttgaagtcgacattgaaaaagtgaaggacaatgtaccttccctgatgacgccgatcgtgttcacgaaccttcaagaaggagaaagcgtgagcttgcaggcagaaggcaatgtcagcctgacacaggacgacatcgtccgcatcgaagaataaattcacaaaatggccgtacttgtcagatgacatgtacggctgtatgatataatattgtgaatgtactcaaagctttaaattaaaaggagattgataaaaaatggcacaaaaaacgtttaaagtaactgcagattctggaatccacgctcgtccagcgactgttcttgtacaaacagcaagcaaatatgatgcagatattaatttggaatataacggaaaaacagtaaaccttaaatctattatgggcgttatgtcactaggtattgccaaaggtgctgaaatcacgatttctgcttccggcgctgatgaaaatgatgctctttccgcacttgaagaaacaatgaaaagcgaaggtttaggcgaataatgcttgaattaaaaggaataggcgcttcagccggtattgcgattgcaaaagcatatcggcttgaggagcctgatctaacggttgaaaagaaaaacatctctgattctgatgcggaagtaaatcgttttgaagacgccatcgagcgttctaagaaagagcttgaaaccattaaaaaccatgctttgaaagagcttggcgaagataaagcggaaatcttttctgcacatttgttagtattaagcgatcctgaactgttaaacccgattaaagacaaaatcaaatctgattctgtcaatgcggaattcgctttaaaagaaacggccgacatgttcgtcaccatgttcgagtcgatggacaatgaatatatgaaagaacgcgccgcggacatccgcgatgtcaccaagcgtgtcacagggcatcttctcggcgttgagattccgaatccgagcctgatttccgaagaagtcatcatcgtggccgaagacttgacaccgtctgatacagcgcaattaaaccgcaactttgtaaaagggtttacaacagatatcggcggacggacgtcccactctgccatcatggcgcgctcgcttgaaattccggccgttgtcggcacaaaagcggcaacgaaaggcatccaaaacggcgtaacagttatcgttgacggcatcaatggcgatgtcatcgttgatccttcccaggaaacaatcagcgaatacgaagaaaagcatcaagccttcctggcgcaaaaagccgaatgggcaaagcttgtcaacgaaccgactgtaacgagcgacggccatcacgtggaacttgccgctaatatcggtacacctgatgatgtaaaaggcgttttggaaaatggaggagaagcagtcggcctttaccgaactgagttcctttacatgggcagagaccagcttccgacagaagaggagcaatttgatgcctataaaaccgttcttgagcgtatggaaggcaaatccgttgtcgttcgtactcttgatatcggcggagacaaagagcttccatatttagaactgccaaaagaaatgaatcctttcttaggatacagagcgatccgtctttgccttgatgagcaagagattttcagaacgcagcttcgtgcgctgcttcgggcaagtacatatggaaacttaaaaattatgttccctatgatcgcgactgtaaacgaatttaaagcagcgaaagcgattcttttagaagaaaaagaaaagctgaaagctgaaggccaacaagtttccgacgacattgaagtcggtatgatggttgaaatcccttcaacagcggtcatcgctgatcaatttgctaaagaagtcgatttcttcagcatcggaacgaatgacctgattcaatacacgatggctgctgaccggatgaatgagcgggtatcttatctttaccagccatacaatcctgcgattctccgcctgatcacgcttgtcattgaagcggctcataaagaaggaaaatgggtcggcatgtgcggcgaaatggcgggagatgaaattgcgatcccgatcctgctgggtcttggattggacgagttctcaatgagtgcgacgtcaatcctgccggcaagaacgcaaatcagcaagctttctaaaaaagagacagaatcgttcaaagagcaaattctgtctatgagcacaacagaagaggttgtacaattcgtaaaagaaaccttcaacctggcataagcaattgaaaatccggaccggcatcaccaatgcccgtccgggttttttgtttatctgaatgatcccggctgcggcggagataatacatgtgaccaattgttagaaagggggattctgatatgcctaggcagccattcaaactgggagatgaggtgtatgtcatttaccggaatccgcatgcagcgaatgtggcgcatataaaggaagctgaagtcgttgatcatccgcttcacgaaggcgaactggcattgtttatgtatgatacatatcacgcctttgccgaagatgatgccgttttttcttcatatgaagaggcggaacggctttaccgtgaattatttgacgggatatgaagacattaccggtatatcacatcctctaaatgcaaaaagtaatggaaatatgcaaaggatgtgtctgtttccaatggtaaaaccgtttgttccccaactcgtctatattgaaccgagagccctggaatatccgcttggaaaagagctgagggataaattttcaaacatgggacttgagatcagggaaacaacttcacacaaccaggtgaggaatatcccgggggaaggccacctgcaaaaatacagaaatgcgaaatccactttggtgatcggcgtcagaaaaacattgaagttcgattcgtcaaaaccgtccgcagaatacgcgatcccgtttgcaacagggtgtatgggtcactgtcattactgctacctgcaaacgacaatgggcagcaagccgtatatcagaacgtacgtcaatgtggaggaaatacttgagcaggcggatcaatatataaaagaaagggctcccgaagatacgcggtttgaagcttcctgcacatccgatatcgtcggaattgaccatttgacacatacgttaaaacgcgccattgagcatttcggtcaaaccgaccatggtaagctgcgtttcgtgacaaaatttcatcatgtcgaccatttgctcgatgccaagcacaacggaaaaacgcgcttccgcttcagcgtgaatgccgaatatgtcattaaaagctttgaacccggcacatccccgttggataaacggatcgaagccgccgtgaaagtagcggaagcgggctatccgctcggttttatcatcgctccgatttatattcatgacggctggcaggaaggctacagagttctgctggaaaagctcgatcgtgcgctgccgcagcatgcgaggcgcgacatcacctttgaaatgatccagcatagattcacgaagccggcaaagagagtcattgaaaaaaactatccaaagacaaagctcgaactggatgaagaaaaacggcgctataaatggggcagatacgggattggcaaatacatttatcagaaggatgaagaagcagagcttcgcagcgcccttgaatcgtatatcgacaactattttcccgaagcaaaaatcgaatatttcacataacagagctttagttgataaagctctgttttttgttttgaaaacattatgttaaaaaaggatttttccactccattaacaccgcataatcaagcgattcctcatcttcaatgtagccgggaatcacacaaactggagagcgtccgcaatgaagcaggaacgagagcactggatcgcgcttttccccgtccaatacagcttgaacatactgttcgggcgtcatttcttcagccgacttgtgataatggggaatccgtccgccgccaatgagacgcttgagccctttaaagaccgtcagttcatacatggattgcatcagccgcattccgatgccgagttttcgatagtcgggggacacggaaatatcgacgacataaagggagtttccatcgttttgatgtgtgccgatatacccgttgtccgtcacttcatcccagctgtggtgcggatgatgcggatcaaaatcagccatgagcgctgtcatcgaaccgatgatgcggccttcggaaactgcgcaaagcgctccatcgggaaatcgttcaatatgggaatggagctgctcttcattccacagaaggtcttccggaaacggaggcggaaagcattctctttggagagcaatcaaaccgggaatatcttttttgctgtaattgcggatgtccacctgctgataagaagtgccgttatcgacgtaaaactgtttatagatcgccaatcactccttttgctatttcctccattataccgttattttaacaggctatcttaattttgcgaaatttttgccgataaaaagaatatgaaggtgcatgtaaaggagggtttcatttgtttaaaaaactgcatgtcaaaattgccggatttgttgccgtcctgctggttttgacggttatcgtcctacagttctcgacaacacatttgttgaaatcgatgcttgaagatgaggcaaaagaatcaacgtccagcctcctcggttcaattaaaagaaatattgagcttcaattagaacactacgagatttctttgaatcgtataagtgatggagaaatggctcactcattcttaaaagacggggataataaaattataaaaatcgtcaatgatgaattaaaacaattaaaagaaaaaaatgagtatgtcaatttagcttatatcggcacaaaaaagaaggaaatgtttacatttccgaaaacgacctttgatgatgattataatccggctgaaaggccatggtatacgtcagctgcaaaaacacccgacaaagtcgtttggacggaaccttacaaagatgcggtttccggagatatgacagttactgcggcaaaagccatcgtcgtcaataataaagttgaaggcgttgtcagtatagacttgtcattgaattcattgaacaaaattatcgaaaatcaaaagatgccttatgacggctacgcatttattttggaccaaaacgggacaatgctcgcccacccgtcaaaacagggcgacgatatatcgaatgataaaacatatcgggacatcccgtcatcaaaagacggaatcaaagtaggcaaagatactgtgatcgcttatcagactgtcggcggtacgggctggaaagtcggtacgcagttcgacacggcgaagctgatgtgggtcgcgcaggaaatgaacaaaatggtcattatcgtttcaatcattgctctggcagcggcgatcattttaagctatttccttgccaaaacgatcacaggcccgattaagcagctgattgccaaaacaaaagcagtcgctggcggcgatttgacggtccaaacagcagctgcctcaaaagatgaaatcggtatattgacaaaagactttaacaagatggtcgaacatatgaaagaaatgattgtgcaagtcagatcatcgtccggaaaagtatcggatacgaccgatcaattaagcgctgtttcagaagagacggtttctgcgagcgatgaaatcgccaaagcaatcgaagaagtggcgacaggcgcgactgaacaggcggctgaggtcgaaaatgtcaatgaacaatccgaacggctgtctgtcaaaattaaagaaatcgaacatcatgccgacagcatcaagaaactttcgagaacatcagaagaagcaagctatacaggaatcgatgccctcgggcagctgcttgcaaagtcaaatgaagcaaactcggagacaaagaaagtggaacatatgctattccagcttgaagaaaaaacgaaaaacattgaagacgttgttacagccatctcggcgatctctgatcagacaaacctgcttgctctgaacgccagcattgaagcggcccgtgccggagaaagcggacgcggttttgcggtagttgcagaagaggtgagaaagcttgctgaacaatcggcggtttcttcacagcacatcagtgaaacggtcaaacagattcagatggaaacgaaagaagccgtttcagcgatgacagaagcaagcaagatgaatgaagtgcaaaatggaatgattcacgaaacaggtgaagcgctcagcaaaattactgctgaaatgcaggcgctcgtcaactcaattgaccacatttattctgaaatctcggatatgagcggagagcagcaaaaaatgtccgattcgattcagagcatttcagccatttcccagcagtctgccgcggctgcggaagaggtcagcgcttcggccaacgagcagctgacagcgctggaaagcatcgcaaaatcggctgaagcgctgagcgaggccaaccaagaattattaaatgcgatcaataagtttaacgtgtaataaagaggtccctcttgttgaaagagggacttctcctttttcaacattcacaatcccaattttcagaatatacgtgttacactataagaaggaagggagtgatcattgtggacttaaagatgaatggcaaaacagcgcttgtggctgcaagcagcaaaggacttggcaatgcgatcgccaaagccattgcgaaagaaggggcaaatgtcatgctgtccgggagacacgaagcggacttgaaaaaagccgcggaagagctgaacggactcggcggcggcaccgtctcttatcaagtatgcgatcttgcagacgccgacgggatcaaagcgctcgttcaaaagaccgctgacacatttggaacgatcgatatgcttgtcaacaatgtcggaggaccgaagggcggcagcctgcttgatctgacagacgatgactggacctcatcatttgaattgcatctgctcagctatgtccgtttaatccgcgaagcttttccatatctcaaaaaggatgggggacgcatcgttaatatcgcttcatcatcagtcaaacagccgattccgggcttgctgctttccaacacgtttcgaatgggaatcgtcggtctgacaaaatcgattgccgaagagttggccgaacaccgcattttgatcaacacgctcgcccccggaagaatcgcgacggaccgcgtggcagagcttgatcggctgaaagccgagaaaacaggcctttccgagcagcaggtgaaagaaagctatgagaaagaaattccgctcggctcctacggaaaacctgacgactttgcacagtatgcaagctttcttttatcagagtgcaatacatatatgactggacaaacgctgctgatcgacggcggaatggtaaaagcaatttaagggggatgagaccatgaaaaaaacggtcggatttatcggactcggtgtaatgggaaacagcatggcctcgcacattttagccgcgggctatcccgtcagcgcctatacgagaacgaaacacaaagcggacagcctcgtggaaaaaggggcggaatggaaatcatccgtcaaagcactggcgcagtcgtctgatgtgatcatcacaatggtcggctacccaaaagacgttgaagaggtttactttggaagcgaaggcattattgaaaatgccaaaaaaggttcctaccttatcgatatgacgacttccaaaccttcgcttgccaaacaaatcgagactgccgcaaaagagaaaggactttacgctttggatgctccggtttcaggcggggacgtcggcgcgaggaacggcacgctcgctatcatggtcggaggagaacggaaagcttatgatgaatgctacccgctcttttcgatcatgggtgaaaacatccagtatcaggggccggccggaagcggccagcatacgaaaatgtgcaaccagattgcgattgccgcagggatgatcggcgtcgcagaagcgatggcctacgccgaaaaatccggactcgatcccgacaacgtgctgaaaagcattacgaccggcgctgcgggaagctggtcgctctcaaatctagcgcctagaatgctgaaaggcgactttgaaccgggtttttacgtcaaacactttgttaaagacatgggcatcgcgcttgaagaggcggagctgatgggcgagaaaatgccggggctcgagcttgcgaaaagcctttacgacacccttgttgaaaaaggcgaagaaaacagcggcacccaaagtctgtacaagctttggacagaatacaaataacgaaaaaaaccacttgctgcatgcaagtggttttttgctggttcttattttccgatgaactgctgagtccagtagttgccgtccttcacatatccgacaccgatatgcgtgaagttaggattcataatgttttttctgtggccttcactgttcatccaagctttgacgacttcttgaggcgttttttggccttttgcgatgttttctccggcagtgcggtatgtgatgccgaatttcttcatcatgtcaaatggagaaccgtaagtcgggctgttgtgatcaaaatagttgttatctttcatatcttgagatttcgtgcgggcaaccttgctcagcttttcatccaatgtaagaggttttagcccttgtttctttctttctgcattcgtcagttcaacaacttctttttcatacgcgcttacagaagaagatgcaggcgctgtattttgcttttgctgtgaagtctgctcttttgaagccgcaggctttgaagctttaggagcagaagccttcggtgcagaagctttaggctgttgagttgcttgtttcatataagaatgaagcagggactgaattttttcttggtcagctttagaaagctggttcatgttttggatattcagtttgcccgcgagatcagttacatttatggaatgaacggttttgacttgtacttgctgctgctctttagcgtctgcgtgctgaacgccgctgaatgtgaagagcgttgctgcagctgctgctgataaaagaaaagcttttttcataaacagtaatcctcctaaatgttgtagtagttgttgtttcgtacactagaatcataacatggcttttttgaaataatagatccatatattccctttgacaaggtattattgttaattttgacataaaaaaagaaaaaccctttgctgccaatatgcaaccagatcgttcttttacacgtcttgtcataaacgtggtaaaatttaaatttgttagttaaattttaatataaaaagagattgacagcttttttgaaaactttagattgtaacaaccattacaaaagtgttacaatatatctcagttaattaatgtaaaattgaatattgtgagaggagagagagtttcagtgacagaatctcaacatgatccggctgaaatcaaaaagagcaggcgttcgcgtttatggcggatcaacctgtacttctttgcggtgttcactttgttcgctgcgctgattgtcaagctgggcctcgtgcaaatcgtcaatggagaggcgtatgagcaggaagcttcgaaaaccgaggcgaaaattgcgtcatacccggcaccgcggggtaaaatgtatgacagatacgggcgggtggttgtcgacaaccaaagcgttcccgcgatcacatatacgatgatgactagcacaaaaacggaggaaaaaatcagcacagccaaaaaactcgcagaattgatcgatatcgatacttcgtttctgaaagagagagatctgaaagattactggcttgccagacacccgaaaaaagctgctgcacttctgaaagacagcgagaaaaccctcaagtctgatcaaacatacaagcttcaggtggaccgcgttccggcggaagagatcaaagcgctggaaaaggacaaagatgagcttaaagtcgcagcgattttcagaagattttctggcggctatgcgtatgagccgcaaatcgtcaaggcgatgagcccgaaaaccgcggggaaaaacgatgcgcagctccttgatgagaaggcttctaaacagatgccggccaacgatttgacgtatgaggaagtctcacgcgtttccgagcatcttgaggaactgcccggcgtcgacgtcatcatggactggaccaggaaatatccttatgaaaaaacgctctactccattttcggaggcgtcacaacgcctgaacaagggcttatcaaggaccgggaagacttttacctgacaaggggatatgcccggaatgacagagtgggaaaaagctatctcgagtatcaatatgaagaatatttaaatccgaaaaaagcgaaagtccaatataccgaaaaccgttcaggaaaggttatcagccaggaaacggttgatgaaggaagacgcggctacgatctgcagctgacgttcgacatggagctccaaaagaaagtcgaagaggctatcgaagaggagcttaataaattccgcggctcaaactacatgctggacagagcgttcgtcgtcatgatggacccgaataacggagacattctgtccatggccggaaagcggatcgtcgacggcaaaatcaccgactatgcaatcggcgcgtttacaacccagtacgaaatgggatcggcggtcaaaggcgcgaccgtgcttgccggctatcaggacggcatgccgcatgggcagagttatttagaccaagagctgagcttcgcagggggagttaaaaaaggttcctacagaggaaacactatcggttgggctaatgaagttagagcgctggaaaaaagttcaaacgtttatatgttctatgtggcaatgagaatggcaggaattacgtatgtaccgaacggcccgcttccggcgaacctagaggacttaaagaaaatgaggtattacttcaatcaatttggccttggggtaaaaacaggcatcgacttgccgcaggagtcggccgggatgcagacaaacccaaaaatagtcgggggtctcctcctcgatgaagcgatcggccagtttgacacgtacacgcctttgcagctcgcccaatatgtttcaacgatcgccaacggcggatacaggttgcagccgagagtcgtgaaaagcattcaccagccagaaagcgaaaaactcggtccggtcattgaagagcgctctgccaatgtgctgaatcgtatcaacaattctcaaagcgacatcgccatcgtcaagcaaggatttaaacgagtaacccagacgggaactgcagccggcgcattcggttcgcttgacgtatcaggcaaaaccggaacggcgcagacgcaatactacggcacaaaccgaaactggtgggggactaggacttacaatatcacctttgccggctattacccgtcggaaaatccgcaggtcgccttcagcgttgtcgtcccgaatgtcgacgacaaaacgaagatgaacaaaaacatcgccgccaaaatcgtcaaagcctatgtcgatctgcaaaaaaaatacagcaaagattagacaaaaaagaacacggattttttccgggttctttttttgttatcaaaatttgacgaatgctagaagttttgaaggagatttctcgcattttagcgaatccttttaagcaaaatagttttaatgaatgctggtcatgaatagggtataaaggagggatatgatggaacaaaaaacaaaacgttttgagcaatataagcctcatatgaatttacaggcagtcctgtcagctaacggccgttttatatacatatctgcaaattgcaaagagctcttaagctacgagcagaatgaactgatcggtacgtatttgaaggactatttacacgaagacgatctttttctggtagaaagctatttttacaatgagcatcatttgctgccctgcaccttcagatttgtgaaaaaagactacacgatgatctggatcgaagcatcgatcgatttcgtgacgacccatgttggagaaaaagaacgcgaaattgtactcaaaatgaaagtgtttgaagaccgtccctctaagaaaagcagctccataaaagaggaagacgctccggaagaagcctccaggctgccggcaaaagaggaattcgaagccatgatcgaaggcttgccaaaccctctgtgcatcagcgttcaaggggaaatagtctacgtaaatgacgccatggtcaacctgctcggagccgagcataaacggcaaattatcggaaagtattcctacgattttatcgagaaagagtaccatgacatcgtcaaaaaccgcattaagcggatgcagcagggacttgatgtcggaatgatcgagcaaacgtggcataagctcgacggcacgcagattcacctcgaagtcaaggcggcgccgaccatttatcaaaaccagaaagcggagctgcttcttctcattgacatttcatcgagaaaaaaatttcagaccattttgcaaaaaagcagggagcgatatcagctcttgattcaaaactcaatcgatacgatagccgtgattcataaaggaagatgggtctttatgaatgaatcgggcattcgtctgtttgaagcaaagacgtatgaggatttaatcggcaaagatatttacgaacacctgcacccatgcgatcacgaagatgtcaaagcgaggctgaaacggatcacagaccgccaatccgaatctgaaatcataaaacagacgtggtatacatttgaaaaaaggctcatctatacagaaatggtttgcatccctacgacatttttcggggaaacggcggttcaggtgattttaagggacatttctgaacgcaagcagaccgaagagctgatggtccgttcggaaaagctgtcgattgccggacagcttgcagccgggatcgcccatgaaatccgcaatccgctcaccgcgatcaaagggtttttgcagctgatgaagccgacaatggaagaaaatgaacattattttaatattatcttttccgagttaagcagaatcgaattgatcttgagcgagcttctcatgctggcaaagccgcagcaaaacgcattgaaagaaaagcttgatctgatcaggctgatccgcgaagtgacggcgcttttagaaacgcaggccaacttaaacggcattttgatcaatacgatcctcacagacgacaaaatttacattaaaggggatcaaaatcaattaaagcaagtgtttatcaacctaatcaaaaacgccgtcgaatccatgccaaacggcgggacggttcatttgacggtcagagaaaccgacgattcggtcgtcgtcgaggtggaggacgaaggagaagggatacctgaacatgtcctgaagcggatcggcgagccgtttttgacgacgaaggaaaaaggaacaggcctcggtttgatggtcaccttcaatatcatcgaaaatcacaacggaaccatcgaagtcgacagcaaagcagaaaaaggcacgacatttaagattctatttccaaaataaaataaaaaaacaacggcgtaaaagccgttgtttacgtagtctgtatcgattgcctcttattgaaaacaaaggactccagccggtcaagaccttcccttagcgtatcaggagaatatgcgtaagagatcctcacatagccttccccgtattcagaaaacgagctgcccggcacgatcgcaagcccctcttcttcaagaagcgacatgcagaagtcaaaggaagacattccaaacgatttgatggacgggaaaatgtagaatgctcccgacggtttaatcacatcgaggcccatcgtcacaagtctgtcgtacacgtagtccagccgttttttatactgctcgcgcatgatcagagcgtcatcaaacccgttggtgacggcttccagagcagctttttgagaaatcgatgaagcgcaagatacgttgtattgatggacttttaaaatatgctttgcgatttccttcggtgcgaacaaaaacccgattctccagcccgtcatgctgtgggatttggaaagcccgccgatgacgatcgtctggtcccttagcacagttgcgatcgagtggtgcggtctgtcaaaagtgagttcgctgtatatttcatctgagagcacaaagacgtttcggccttttaaaagggaggcgatgtccttcagctcttcttcggacagcgtcattcccgtcggattcgacggatatggaagaacaacacattttgtcttcggcgtcagcgcttcctcgatcaattttgctgtcagcttaaagccgtgggacgtggtgtcaatgatcaatggagacgctccgcacattttgatgatcggctcatagccggggtataccggccccggaagaatgacttcatcgcccggagataaaatcgtgcggaatgccgaatcgatagcctggctggcgcctgttgtcacaataatctcgctttccgcttcataatttaaatcggcttttttcttcatataaagctgtacagcctgcctcagctcaggatatccggcgttgtgagtgtaggatgtttgattctcatctatcgcttttttggcggcctgtttgacatggtggggggtgaagaaatcaggctggccgattgttaaagagattacgttttcgtactgggatacaaggtttgagaacttgcggatccctgagatttcgatttcttttacatttggattaagcaaatgttccatttagcatcaccttaaaaatgttatggtttatcttattttaccatcatcagaccaattgtcatcttttaatcaatcaattttataaaaactcgtaacaagtatatgcgaaacgatgcaaggtatgcggacatgcggacggcggcagatagaaaaataagacaatcaaacgattgccttacgttatgttccgtttagtagccgtaatcggagtcaaaatcttctttccacgaaatatatatttgttcttcactgtctgaagcttccttgagcatttctgtgtaaacggcccggctgacctcttctaaaatggtcatttcatgatttttaatcgctacaattgttcccatcataaacacctttcctgaaaaatccttgaccattgtaacacgataaatgtcaaagtcaatgaaaaacttgtgatccgtacattaatttaactttaaaaaaatgcgatacgtattgataatgttcagccagtcttagtagtatatagaagtcaagatgttaggaggaaaagcacattggaattggaattagacaaacacgaaactgctcctgaaaggagcgagtatgccggaatcggcgcgcgttttgtagcttccctgctcgacggattgattctcgggattcccgcatatattttcacgtacgttttaacagcgacgttgatgttgggaaattcggatatcatgctcatgatggagactgatcccgagtatttgagcgatcaggaagtctttacgtttatcatcagtatgttcaaaaccgtagcgatcgttggaagtattacttttattgtgtattttctttattacacgctgatggaatcatccaaatggcaagggacgctaggcaagaaaatcatgaacgttcaggtggcgaaggcagaaggcggaagaatctcattcggccgtgcagccggaaggtttctggccaaaagctttctatctccgattttgatgatcggctacattatggccttttttacagaaaggcgccaggcgcttcatgatatgttggcaggaaccattgtcgtaaaaaaataacgggcaaaagacagcacgctttcagcttgaatgcgtgctgtcttgttcaggaaaatgtttcacggcaggaataaaaataaggaggcatcaatccagatggatactcagccggaacgtgaacaagctgtaaagcgggcgcaaagaacgggaatcaagctctttttgacgctgccgattctttcttgggcgttatacgattttgcaaataccattttttcatcaaatattgtgacgatcttttttcctttttatttgcaggaggcagtcggcgaaaatgccagcatgaatcaggtggcaagcacttttatctcctattcgaacgcagccgcaagctttctgcttgtcattttcacgcctttattcggagtgctgatcgaccgaacgggcagaaagaaaaaatacatcggcctgtttacgatgatttgtgtttcatgcaccattttaatgggggtttttgccggggcttcgtttcagaaggacatatacgggcttccgctatccttgatccttgtcgtcatcatgtttgtgaccgcaaagtttttctatcattcaagcttggtgttctatgatacgattttggctgacttggggacaaaagaagaaatcccgctcttatcaggtttcggaattgcaatcgggtatatcggcactttagccgggttaacggtataccttcttgtcggcaaccaggattttcaccgcgcattcatcccgtcggctctcttgtttctgtttttttcacttccgtatctgctcttcacgaaagagaaaagaaaaccggaaccgaaagaaaagaaatcgtttttcagcggatactgggaaattgtgcagacattcaaagacattcgtctatataagccggtcttcttattcatgatcgcctactttttcctgaatgatgcgcttgctacagcaatagccatgatggcggtttattcaaaaacggtcatcggttttacgaccggacaattcgttttgctttaccttgtttctactgtatcaagcatcatcggttcatttctgctcggctttgtgacgaaaagaatcggcgccaagcacgcggtcagccttgtcgccgccattatgatcaccgctttgacgattggagcatgcacgacgtcaacgctcttgttttggattgcggggagcttgttcggcatttcgcttggaggcacatgggtcgcatcaaggacactgattatcgagctgacgccagaacataaaagaggcgaatttttcggattgtttgctttgtcggggaaaatctcttccattttcggtccggtcctctacggatcgattactttgctgttcagggatctcgggaacatggccagccgaatggctttcggatctttagtgttattggcggcgatcggcctgatcattcatcaaaatgttaaggcaaaagcttgagccggagcatcaacttttaacaaaagacgccgatataaaaagtaaacacaaagtaggatagagagggatatcagtgtcttcaaaccaacaggaaattttattaagttcgggaaccaatgaattagaaatcgtgaagttcgaggttggtctcaacattttcggcataaatgtcatgaaagtcagagaaatcattcagccggttgaaattacgaaagtgcctcattcgcataagcatatggagggcatgattacattgcgcggggaaattcttcccgtcattgatttattctctttctttggcgttgagcacggtgatgacgagcatcaagaaaaatacattgtgacggaatttaacaagcggaaaatcgtctttcacactggagcggtttcacagattcaccgggtgtcatgggaagaaattgagaagccgactgctttgaatcaagggatggaccgtcaccttaccggcatcattaagctcgacggcaccatgattttcctgccagattacgaaaaaatcatttttgatcttgagtctgagtcaggtatggacccttatcaaatgaaaaatgaaaaattcgatcagagacggactgacaaaaagctgatcattgtcgaggactctccgctcctcttgcggctattggtggaaaagctgaatgaagcgggatacaacaacatcgtgtcttttgaaaacggaaaagacgcttacgagcacgcgcttcaattgatggaagacggcacagctcttcacgaaaaagtcgatctgatgatcacggatattgaaatgccgcagatggatggacaccggctcacaaagctgctaaaagataacccgctgagtacggagctgccgatcttgattttctcttctttgattacagacgatcttcgccataaaggggaacaagtcggagccgatgaacaaatcagcaagccagagctcaatgaactgatcgaaaagcttgataaatatattttcaagaactaaaaaaagcctcgaaaggaggcttttttttttttattaaaaatagctttcgccaagcttcttgaagacgggttttgaggctggacgcttccggtttgtgacgagcggtttttctttgattcccgtgtagttttgaagaagctgtttcgctatattcaaggacatatgagctttagggttccgatacgaatgatttaatgtacctaagtgtggaaggtttgcgaagtcttcttttgttggaggcatgtgaaaaaagtagtctccgagagatatcagcacatctgactgctgctggctgaatcttggatttttcgaaaaatgcaggcctacctttttaccttttccttcattaagcagcttttgcaaagctttctttttcagaagatacaggtatttgggattagtcgcggttttcgcatggcggttaactgtataaatcgcttttgaaaggttttcaactgtcggttttaattctttcgtatgattatggtcgtccattttttctctcctatccattcgtttctagatcacctcctaaagatgcaaggcttatgtctaaattatacgaaatagaacagaaaatgcaaatatcccatagaaaaaacgcgcgattttttatggaatcgcgcgttttcatctttataaaacagagttcattttcgcttttgtatttttttgtctcttcagcgccgcttgaacgtcgatttccgcactctcggcgcttaatttaggcagggcgataaagtagtacagcgccgccagcagaataattcccgccaagccgtaatatatataatccacatcggcgatgattcccgggaataggacagcgatcatgccaagcgctgaggattgcgccagcattgtcagcggatcggtccacccgctgacccttcccatcagccttggatggacgattttgggaatccagccgccaagagctgtgttgatcggcccgatgcatatcccggcaagaaatgcagccgagtagtatacgggcaattgatctgtaaagccaagcaggatgataaaggcacccgcgataaaaatcgggactgacatcatgtatgccggcttcacttttttttcgagcagggcggcgacggcaatcccagtcaaaagtccgatgcccagtacgattgtgaagagggaagtatgccactcataactgtcaggggacagctcatacttcattttaaacatcggcagaaccgaaagtccgccgcttacaagcccgaaaataaaatatccgaatacaagagaggcaagcaatttattttttaatatataaacgatgccttccttaaaatcgcgcatcgaatctttgacggtcatgtttttccagcctttatttccgttcggcttccgcgctgcaagcggtatatcgcaggaacggattaaaaagccggagacgataaagctcacaaaatcaagagcgattgctccatgcaagccgatcgtcttgtacataaatgctccaattcctacgccgaacaatagaaacaggctgaaaagcatctggttcagtcctgcagcctttgcatactggtcctttcttaaaatggcctggaccaaacttgcttcggccgggtagaaaaattttgtaaccgcgcttctgataaataggactaaaaacacaagcggtataatttgaagatacaatacaaagaaaagaacgacagtcagtcccgctctgatccaatcacagttttccgcgactttcttgcggtcaaaacggtcagcgaccaccccgacgataaagaatacgaaaaccgtcggcaaggaatacatcagctcggcgattgtcgtataggccggctggctgctgaaccggtcgagcaagaaaaaggcgaaagccatatttccgactgtcgttcccatttgagaagcgaaagctgcgaaaaaaagtcggacgaaattacgatttttaaaaagatccatatatacgctccttaccctaaaggtcccattatatcttaatacaagatgttgtattgttcaaattgcatttgtctggaaatgtactcgtctaaggtgtaatggacactcgggttccgttgggtacgatagaagcaagttccagaacatcccgattgtgcatgcggatacatccccttgaaacagctttgccaattgacgaagggttattcgttccatggatgccgtagtgctgttttgacaggctcagccagtaggcgccgaacgggccgcccggatttggctgccggttgacgatgacaaattcgcctctcggcgtctgtgtgaggatttttccgacggcaatcggatatgtttttacaagtctgtctcgctcatacaatctgagcgttcttccgttgagagacacggcaatccggtatggaattgtgtccggatttctgatgccgggaatgataatcgactggcccgcggacacttggccgccgtttaagccaggattcgcctgcagcaacgcctgccgggtcgttctgaaatcggcggcgatgctttcaagggtttctccgggtttgacttggtacatcagcaataatcagcacatctccttttcaaaaacgaaaagagagccttttccgctgctaatatatagacggaaagaggctgaggaagtttcgtttttttgatggggattggatgaaatggagcgggaatgtttttacttaatgtatgcagatgccttttgttttgagccaaaagaccgggcaagatttaaatggattcaagctggaacacggtgatttcaggctttgacagaaagcggagcggcagcctggtcgtgccgattcctcgattgacatagattttcattccggctgtttcatacattccttccgtataaatttctccgtacggaggcgtaatcaaaggaccgaatacgggaatctgaatttgtccgccgtgggtgtgtccggatatttgcagattgacggggtattgatttgccgttaaagcggcatcaggctcatggacgagcaaaatcgaaaaggcttttttgctcagctttgacaggatgccttcgtagtcaggtctgccgagcatcaaatcatcgagtgaagcgatctcaattacgcttccgtctatcaattcaagcttcagcaaatcgtttcgcagcacccgaaaaccggccgatgccatgagcgtctgatagacttttgttccatagcctccgtgatcatggttcccgaatatagcaagctttccatagggggctgaaagcttttttaaggcgcttacagcacgctcgtgttcccggtagcgatgcggtttatctattaaatccccgctgaatacgataagatccggggagagggcgttcacttggctgacaacatttgaaagctcgtctgctgtaaagtattcgcttaagtgggtatcgctgaactgaacgatccgaaactgatcaaaccctttaggaatgagccgatgccgaatgggaataaagtttgtttcaagcatgtgcggttcgagatagcgcgcatagcccaagccgccggcagcggtaaagagccctgctgcggcaaggcctaagaagccttttaaaaattgtcttctggacggatttttcataatcaaccaacctttaatagattctctacattatatcatccagaaaagccattttaggacagtccgcatgttttgttaattttttttaatttatatgataaactatcaattgaatgaatactcattcataacaagggggatggatatggacagaaaagttgtaatcgtgaccggcgggtcgagcggaatgggaaaagcgatcgccaaaaagcaggctgaagaaggatggaatgtgatgattacgggcagaacacaagaaacgctcgaagcggccaaagaagaaattgaaacttttgccgggcaggtggccgtatgccggatggatgtccggtctgttgaagatgtggaacagatgatcacagaggcggcaggacggtttggcacgatcgacgctttggttaacaatgccgcaggcaactttatctgcccggctgaaaaactatcggtcaacggctggaaggcggtcatcgatatcgtgctgaacggcacattttattgcagccaagcagccggccgctactggatcaaggaaaagaaacgcggccagattttaaatatggtcgcgacgtatgcatggggcgccggtgccggtgtcgttcactccgcggcggcaaaagcaggcgttctgtcgctgacaaggacgcttgccgtcgagtggggaagtgcatacgggattaggtgcaacgccattgcgcccggtccgatcgagaggacgggcggagccgaaaaattatttgaatcggaagaagccgcgcacgcgacaatcaaaagcgttccgctcaaaaggctgggcacccctgaagaaatcgcgggactcgccgcatttttgctttctgagcaggcgggatatgtcaacggggagtgtgtgacgatggacggaggtcaatggctgaatccccgtccgttttagatttcaaattcaaaggtgcgagccggtatggtataatcagacaaagattagaagcaggtgatatgccatgttggatccactcgatattttaacgaacattgaagatgtcattccatactatcagccgatcttcagtgctgaagaacaaaaggtgatcggctatgaagtgctggggcgcatcaaggtagaaactgaagtgaagagcctcgggccgtttttttctgatccgacaattccggaagaatacaagaaagaggttgatctcaaggtgatccgccaggcgctcgatcattttctggacagcgggcgcgacctgctcatcttcgtcaatcaagatgcaaatgtgctgatgatggatcacggcgaatcgttcctcgacctgttgatggaatatcaggataaagggctcgagctcagccgtttcgttatcgaaatcacggagcaaaagtttgaaggggatattgaacagcttcatcatttgctgacctattaccgtacatacggaattaaagtcgctgttgataatatcggtaaggaaagcagcaatctcgacagaatcgctcttctttctccggatctgttaaagatcgaccttcagccgctcaagctgtcttctccttcgccttcctatgaatatgtgctttacagcatatctctccttgccagaaaaatcggagccgcattgctttatgaagatattgaagcgagctttcagctgcaatacgcatggagaaacgggggccgatatttccaggggcagtatcttgagctgccgaaggataaatttatcgaacgggatgtattaaaggaccggctgcaggccgagtttcatcaattcatcacgcatgagaagaagaagctaaccattctgtacgatcactccgagcagttttacaaacgggttcatcagcttgtcacatcgctaaagaaaacggctcagtcagacgatgaatttctcttcaatctcggaaaagaactgacagattgcagctttagaatttacatgtgcgatgaagacggtattcagctgacgaaaaacgtgtttaagcatgacggagcatggatatttcagcctgagtacatcggcaaaaattggagctggcgcccttattttctcgagaatatcatgaggatgagaacgatgagaaaagggtttttcagcgatttgtacagcgatatcgaaacgggggaaatgatcagaacgttttcctatccgatggatgaagaattgtatctgttcattgacctgtcctactcatatttatacgaacaagacggattaatttaagcggcggcctttcgccgctttttctttttgaaaaaatgaatcccgagaggtttgtttcgcgtatataaaggaaaatgtgaaaatataaatgctaaaaaggggtggatcatatgaagaacgtttggtcatccttactgtgcgcgcttctggctgcggctcttgtattcttctgcgcggattttgccaaagccggagaaaaaccgacaagagcatcgttatttgagacccttcaatccgtatcggacgtccattttcagctgaccgaaaaggaaagaacgaaaacagacatgatatccctcttggaaccttatatggagcacgccatggcagtgaagtatgtagaggcgaacgcctttcctgaacaagcggggtggattttttacgggacagacgcgcctgaagttgcaatccctttcttcagctatgacgaagacacaaaagtggcggagaaagacggaagctataccgtatatgaatttgttggagatcaaaacgacggccctgtttcatatcaaaaaaattatcagacggtgacgctgaagaataccggcggcagcttcaaagtaacggatatcggccaatctgatacaaaaccggctggagaagaaataatgtccaaacaaccggatgaaaaagaaacaagctcgaattttgcggataaaggggaaggagaccaggctgcatttccgctttttgccaccgatgttaactggacattggccggaattttcagctagcaaaagaatttaaagaaaatcattgacaatgatactgataatcattatcatttaattatagagagatgaacctctctgttccccaacccctctatcagatcaagatttaaaaaacttggcgctgcccccgccaagttttttatttgcatggaatcccgcacttcaaatagctgcgggatttttgggcattaggcgcgcgcaggaataagacaatcctttgctccataaatctaaattggtggttcaaatagactcctctgcagtcaaaaaaatatttttcatgtatgacatgaaaaaagaaaactcaaactatgaaaaagcggtttttctttttcatgatcaaaaaggaaaaatgtcatcggctgatactttgtggtatgatgctttgtagaacttgtattataattaatacttgttgatcctgaagttgtttttttgaaaggagtcttttttagaatgtcacaattaatgggtatcatcacgagactgcagagcctgcaagagactgcggaggctgccggagaaccgacgcagcgcaattttgaagtgaacggagaaaaaatttgcagcgtaaaatattttgaaaaaaaccaaacgtttgagctgacagtttatcaaaaaggagataagcctaccacatttccgtttgacaacatcgatatgatttcaatcgaaatctttgaactgcttcagcaataggaggatatggcatgaaagcttttccaagcgttatttgtccgcattgcaaaacaaccgagcatatggatcaagttctgacggcccagtccaatcagaatgtgatttacagatgtgagagctgcgggttcagcttgaaaaatataccgaccaaaaaaggatagcagacagacgaatcgttccatcttcggtgcagatcaaaaatgaaaaggggcattccaatggctgattcttttcttttttacaatctttctgaagatcaaatgacatttcctgaagtgatcgggagactaaagtcgttcatacgccaagatccgagggcaagctatctgctgtccgtcggaacagactcgcagatccatcagaattgcacaaaatttatcacagctatccatttgcaccgcaaaggcaaaggagcgtggggctgtctgaaaaacacggttgtcaacagaccgatacatagcctcagggagaaaatatcgcttgaaacagcttacagccaagagattgccgcatatcttttaaatgattattttaatgaaatcatggatctgcttcttccgtttacagacgagggagcagatttaacccttgaagttcatttggatatcggaaaaaaaggaatgacaaaggatttaattcaggaaatgacaggacgaatcacttcgatggggatctgcgccaaaattaaacctgactcctatacagcttcaagctatgcaaaccggtacacaaaataattgtttgaaagaaaatcgaacagatgtcgaaatgtgcggttgacgtttgattttcaatttcatattctagccctatagaaactagagagaacatattgtttctgactctagctaaatcaattagggggctggttaagaatggaacgcttttcagaagaagagagaaaactgttgctgaacgtacttttggaccatgagtatgccgtagagctactaagcagtgagatcaatgatatagaaactggtacaaaaaatgtggatagcctgacatataagaaactggttaccttatatgaccgtgtccggtctgaaaattaggtcagattatatcaattgatactcattagagtatcttttttgtttcctaaaaggatattgaatgataaactgaccttgggagaaaggaaagttttcgacaaatattgatattgtttatattattgtagtatagggaaattatgcgttgatggattaaagctgaaaaggagtcgaaaaatcatgattagtttgcaatcagatgaacttcttgaaacgacagtaggtcagtttatgatcgatgctgataaagtagcccatgttcaagtcggaaacaatctggaacatgcccttctcgttttgacgaaaaccggatataccgcgatccctgtacttgatgcttctttccgtttgcacggattaatcggaacgaatatgatcatggataaaatcttcggcttggaacgaatcgaatttgagaagcttgataagattcatgttgaagaagtcatgctgacggacatcccccgcttaaaaattgatgatccgattttaaaaggattcggactcgtcatcaacaacgcgtttgtatgtgtcgaaaatgaagagcaggttttcgaaggcatttttacaaggcgtgtcgtattaaaacagctgaataagcatttgaggacgttgaataaataggcgcggcagcggcctattttttatttgcagcgctccatccaatcctccgcacattccccgatgcccgacttcccgcttgattaaaaaacagccgtttgattaaatgtatgataagaaaaacttattggaatgaggaatgtccatgcagcttcaagagcttcacatgcttgtcgttctggcggaagaattaaatatgcggaaagcggctgaacgtctgtttgtttcccagccggcattatcccagcggctgcagaccatcgagaaatcatggggaacgaaaatttttttaagatcgcaaaaagggctgactgtcacgtctgccggagaaaaaattatccagtttgcaaaagatgtaacattggaacaggaaaaagtgagagagaatatagatgagctggagggcgagatacacggtacgctcaaattggcggccgcttcgattatcgggcagcattggcttccgaacgttctgaaaacctacgttaaacaatatccgaacgtcaaaatctccctcgtcaccggctggagcagcgaaatgctgaaaagcctctacgaagaccatgttcatattggcattatcaggggaaacccggaatggaaaggccctaagcactacttgatgcgggacgaattgtacctcgtcgatacagagatccgaaacattgaggacattgccaaaacggaacggccgttcatccagttcaaaagcgacagcacgtactatcaggaaattcagcactggtggcaccaaaagttcaaaacatcgccgaaacaaaccattattgtcgaccaaattgaaacatgcaaacagatggctttccacggaatcggttatgcgatccttccatcggtgacgcttcacggaagcgggagccatgttcaccaaatccctttgcttgatgctaaaggaaaagcaatcggcagagatacgtggctgctcggttatgagccggctttccagctgaagcaagtacaggcgtttgtagaagttgtgaaagaatgtacggcaatggaataaacactagaaaggcaggactccaaaaaggggactgcttttttttgtacgatttattgacattgataatcattatcatttaaagtgtatctatacaataatgaaaatcattatcaattatagaggtgattctgttgtctaaagcattgattgcatatgccagcatgtccggcaacacggaggatatcgctatgatcattaaagatacattgcgagagtacggttttgatgtcaccattcaggaaatggatgatgtcgataccgactcattggctgaatatgatcttcttttaatcggcacctacacatggggggacggggatcttccttatgaagcggaatcgttttacgaagaggtctcttcgcttgaccttaaaggaaagaaagcggcatgcttcggatccggcgattatgcatacccccgattttgcgaagcggtcaacacgttttacaccatgcttgaacgaaccggcgccgacctttatcaagagacactgaaaatagagcttgctcctgaaacagatgaagatgccgagtgctgcaaggaatttgccgaaggctttataagatgggcagaacagcaaaaacggcgggctgagatccatgtttcataaaggtgcgacggccgtcgcttcggcaaagcattccggttactttgtcgccgtcaagcgggaaggcatttttcactattcacttgagcaaggctggaaaaggctctttcaattaaaaagcaaaatttgttccatcacctatatcggcgattatttattcggcgcaggggagagaggaacgattatcagatcgtctgaccaaggggcaacctggtcaatctcaagctttccgacaaacgccacgatttggtcgatcacggggagaacggacggctttgtgtgtgcgcatgggaagcattgcatttacatatccgacgatttcggcgtctcatggaaagtcgtcaagccgttttccggtttgagtcatccgcccgttatccgctctctgtgcctccatgaagagcgcctttacatcgggacgcagattcatgaagtgcacggcggtgtttgggcatacgatttggcatcagaatcggcttttatgatcaaaaaagaaaccggccgcatgaccgcctcgatgatcgcatttgaaggcgaatggctggtatgtgcgatgggatccaaaaaagggaatcacggtgccgtcgatttggtcaacattcacacaaatgatgaaatacaaatcaggcggggccttgttgagaatgaagaatcattcctggatgtgtccgaagacaacggaatcatctatgtcacatcggctcaggaccgagacggcttttcaagaatctatcagcttgatttctttgagagggagctgaaatggtttgacacgataaaagggcatgggttcagggtggccaaccaaaaggagaacttcttttgcgcaggtctttatgaatgcaaatttgtcaggccttatgaacagcctgctgcagcccactgattttatagcgttttataggaggaataatgatggggaaagttttgctggtttatgcaagcatgtctggaaatacagaggcgatggccgatttaatcgagaagggccttcttgagggcggggccgaagtggaccgtcatgaagcgatggatgtagatgcggcgctctttaacgattatcagcacatgatatttggcgcctatacttggggcgacggagaacttccggatgagtttttggatatttacgacgatatggaagggatggatttcacaggcaagacgtttgccgttttcggatccggagatacttcttacgagcatttttgcggtgccgtcgacattcttgaagataaaatcaaggagctcggcgggaacgtggtgcttccgtccgtcaaaatcgaaatgaatccggaggatgaagaagaaggcatgctgctccaattcggcagggattttgcaaagaaatgtgaagtgccggcatagcttttgataaaaaaggaaacgggacatccctttcctttttttcttgtttttaaatctttcctttgatacagtaatgaggagaaaaagagaaggaggacttacataatgaaaatgatggatgcaaatgagattatctcatttattcaaaatagtaagaaatcgacacctgttaaagtgtatgtgaaaggcgaccttgaaggaattgacttcggcgcttcagccaagccttttattacaggcaatacaggggttgtattcggagaatgggcggagattcaagctgcgctcgaagccaacaaaggcaaaattgaagactatgtcatcgaaaacgaccgccgcaattcggcgattccaacgctcgatttaaaaaatattaaagcgcgcatcgagccgggtgcgatcatccgcgatcaagtggaaatcggcgataatgccgtcatcatgatgggggcttccatcaacatcggctctgtgatcggagaaggaacgatgatcgatatgaatgtcgtgctgggcggacgagctaccgtcggcaaaaactgccacatcggagcgggatccgtgcttgcgggtgtcattgagcctccttcagcaaaacctgtcgttattgaagacgatgtcgtcatcggtgcaaacgccgtcgtacttgaaggcgtgactgtcggaaaaggagccgttgttgctgccggcgcgatcgttgtggaagatgttgagccttacacagtagtcgccggaacacctgcgaaaaaaatcaaagacatcgatgaaaaaactaaaggcaaaacagaaatcaaacaggaattgcgccagctttaagaagcggcagcgaaaagtgcgtggatgtgacaatccacgcattttcgcatcgccggggaggttagaaagatgaaattggacgaattagcagcgattcgcagagatctgcaccaaattcctgaactcggttttcaggaatataagacacaggcttatcttttgaaccacttagcaaagcatccggaaggacggattgaaattgaaaagtggagaaccggactgtttgtaaaggttaaagggacggcccctgaaaagattttggcgtacagggcggatatggacgggctctctattcgggaagataccggatattctttttcttccgttcatcaggacaggatgcatgcgtgcgggcatgatttccacatgacgattgccctcggcatcatcgatcatttcgtccgccacccggttaaacaagatctgctgtttttgttccagccggctgaggaaggaccgggcggcgctgagccgatgcttgaaagcgacttgtttaaaaagtgggagccgagcatgatcacagcgctgcacatcgcgcctgaactcccggtcggaacgatcggaacgaaaagcgggctgctctttgccaatacgtcggagctcgtaatcgaacttgaaggaaagggcgggcatgccgcatatccccaccttgcagaagatatggtggtcgcggccagttcgctcgttacgcaaatgcagtcgatcgtagccaggaatgtcgatccgctggacagtgctgtcattaccatcgggacgattacaggcggatcggcacaaaacatcatcgctcaggaagcaaggcttgaagggacgatcaggacgctgtccccagcgtcaatggaacaggtgaagaaaaggatcgaggccatggttcggggcctggaaacggcttatcaatgcagcggtaaagtcagctatcctgcagcatattatcaggtctgcaattcaagcgatttagtcgaagactttatgcagttcgtttctgaaaacggccttgcagaggtcgtccgttcaaaagaagcgatgacaggggaggacttcggctatatgctgaaaaagtatccgggcttcatgttttggctcggcgtcgattcaccttacgggcttcaccacgccaagctgcagccgaaagaggaagcgcttgaaacggcagtccgcgtcatgacggcttatttctcttccaaagccaattagataaagcggctggtataaaaaatcggcaaacgtggcatcttaattggtggaggtgtttcttcatgtcgaaaaaaatcggaatcgaacaatctctttctgatgtcgaggctgctttgaaggaaaaagggtatgaggttgtaacgatgaaaaccgaagacgatgcaaaaggctgcgactgctgcgtcgtcactggtctggacactgatatgctcgggatttcagatacgatgaccggagcatctgtcatacaggcgacgggtttaactgccgatgaaatctgtcagcaggttgagcaaaaacttcagtaatagacataaaaccgaagttccagcttcggttttaacttgttttccaaaaaaaacagctgctgcgtgttaaacggttgtttcctcatccggcggcatgttacaatttttttaaaggatttaaatagaacaaccgctaatttaaatttattatcaattaatattgacttaaaatatggtaagcattataatgaactatgtatgtgatattattaactaaatgagaatttaatatttgaattctcatttagatacgggtagcataacccaaaaatcacaattggagggatacataaaatggcagaacgcatggtaggtaaacaagcgccgcgctttgaaatggaagcggttcttgcaaacaaagaattcggaaaagtaagccttgaagaaaacatgaaaaatgataagtggacggttctattcttctatccaatggacttcactttcgtgtgtccgacagaaattacagcaatgtctgaccgctatgacgagtttgaagaccttgatgcagaagttatcggcgtatcaactgacaccatccacactcacttggcatggattaacacggaccgcaaagataacggtctcggccagctgaaatatccgcttgctgccgacacaaaccatgaagtatctcgtgaatacggcgtactgattgaagaagaaggtgtagcgcttcgcggattgttcatcattaatccagaaggcgaacttcaatatcaaacagtgttccataacaatatcggccgtgatgtagacgaaacattgcgcgtgcttcaagcgctgcaaacaggcggtctttgccctgcaaactggaaaccgggacaagcaaccctttaatttcgataagaaatctgattggaaaggtctaacatttgttagacctttttaaacgacaaaaatgacattggaggaaaaatcatgaaattacgtcagccgatgccggaactgaccggcgcaaaagagtggttaaacggagaagtgacaaaagagcagcttataggagaaaagccgacattaattcatttttggtccatcagctgccacttgtgcaaagaggcgatgccacaggtcaatgaattccgcgaccgctacagcgataaactaaacgtggtggccgtgcatatgccgcgttcagaagacgatttagacttgaataaaatcaaagaagttgccgctgaacatgatatcactcagcctatttttgttgacagcgaccataagctgactgacgcttttgagaatgaatatgtccctgcttattacgtgtttgacaaaacaggccagcttcgccattttcaagctggaggcagcggaatgaaaatgctcgaaaaacgtgtgaaccgcgttcttgccgaaacagaacagtctgctgaataaagatgaaaaaccccgttttcatggggttttttatttatttggctccccaattacaaaaaaacaaaaaaaatttcctctagcctcccctttcgacaaataggccatttgacactgtttatttcatttgatgagtctggtggcctgtttttggttcgggagcatttcttacttaccccgtgcataaaagactgtggattcgacaagtgaaatctggaaattttaaatattctggatttataaggcggaataatcattgatatctcacactttccatcataattaaacagtggattctattcctaaattatgtttcattgaaaagtaattttctaggttccttcattatttaccatttttcgacaatgagcttagaataggccgaaatgcttcaaaaactcctcaggcttcaagtttttcggaaatttagttctattttcttaacggagagcaacagtagaaaaacgaaaaaatagttgataaaattagtttggtaatctaatatttttattggaaggtttatttattctgataggagggtataaacggtatgtttaacgagagggaagcattgcgtttaagattagagcagctgaacgaggctgaagttaaggtgattagggagtatcaaattgagcgggataacatatatgcaaagctgcgtgaattggatcgtccatccagctttaatgatacaaaaaaagattttcgcccggagcgtaaaactgaatctctccctgttttagctgaattggctgcacaggagatgaagagctaccagcaacagcagcaacagcagccgcaagcatctcaaaagaaccagcagcagacttctccgcaaacctcctcactgcctgccggaattccagatggaacgacaaggcgcagaaggggtacagcacgtccaggctcaaaagctgcaaaattgcgtgaagcggcgattaaaacattaaaacgccataatgcggccatcaaaagctccgaacttcaaaaagaaatcgaaaaagagagcggacttgagatccctaatatgacaacctttatgcaaagcctgattaaaatgtacccggaagtcaaaaaaccataccgcggtcaatatatattagagggtgagatttctactgagacagagcagcaataggtcaaacccttgctttttcagatagcgtttccattttaagggaacataaaggcggccgctttatacgccgccgcccaatcaactgcttgagacaatctactcaagcggtttttttgtaaaaaccaaattattccttaaagtggtatttaatttaaaggttttgtttctttgtctttgcgtttaatttgatagacccatttttgcgggggtgtttcttctttcgcctgttttttccattctgttattttttgatccattttcgtatcattttgttgaatggcgctcaattgttgttggagctgatcaacttgctctgtaacagtttgaagcaccgcctcgatctgttctgtccgttcaaaaacctcctcgttttgttcaagcgccttctccgtctgctgaaatgcatcaatatcggcaaaatgagaagcgatccacttatcactttcatcgagttgccttttataagagagaatcgtttcataaaacagcgcttcttttgttttttcagcctccaaaagccggcttttcgtttccgtcacccgctcttttaataccgcaacatcagtttcgatttgtttgagctgaagacttttagcatgaagttcatctttcaggcgggcattttcgtatgcagcgtttttgagctcctgttcctttttttccctcagcgttttttctctttctgcatgaagcttttcgtattctatttggctatgtaagctttttttctcttcttcggcttttacatttgttaaatgaaggcggtgcttttcttctatctcttgttttcttgcataggtttctttttgaagaagctcctgaagaacgacgattttactcagcaattcgctttttatccggttgagcgtttcggccgacttgtcttccttgtttgccgaaatccgctccagttcgaatgacagctgctgaagctgctgtttcattgctgcgttttcccggctgagcttatgatttttctggtgaaaatagcttgcttcaagctcgtgtatcaattgatgtgatcttgccagctcagcttttaaaaaaaggttttcctgtgataaatcttgaaaataaggcagcgaacccgatgtttttttcatggtgaccagccccctataaatgttacaactacaatatgcataaatgaaacccgccatgccttttgaaaaagagattttacagacttgttcggatttctaaagttttgctatgatgttcgcaggcaggaacacgcgaaggaaggttgagccgtatgaaagaaatacatgtcatattatcaggggggctttcgcgccgttttggggaaccgaaggcgtttgcccgctggaaaggcaagccgctttatcaatggtgcaaacaggcgctgggagacgacgtcctgatattgagccgtccgggcttgacggagcggtttatagaactcggggaaaaagcggtgctggaagatatcgaaccgtacagagggaaagggccgcttgccggtatgtacacagccatggagcgggcggaaggggaatgctatattttttcggcctgtgacaccccgcttgtccggcaggagaccatatcggctttaaaacggcagttgaccccggcggatgacgccgtcgtgcctgtcgcagacggaagggcgcagccgcttgttgccgtctaccacagaagggtaaaatccgtcctccatgaacagcttcagcagaacgaactgaagatcagcagttttctcgaccgcattcgcgtcaagtacattgaagcagatgcggttggtgcagagccgtgggaatttataaatgtcaataaaaagtcggatttagaagaaatagagccgttctttccgggatgaaatattttatcatagattgcaagggtttttcggaaggtgtttttcaaagaacagcagacggaaaaatggtatgatatagaaaaggaagtaaaggggatcatcctgatgcatgaacggtattcaagacaaatcagatatcaaaacatcggacaggcgggtcaggacagaatcaggcagagccatgttttgatcgtcggggccggggcgcttggcacgtcagccgctgaagggcttgtgcgcgcaggcatcggcgcactgtctattatagaccgcgattatgtggaatggagcaacttgcaaaggcagcagctctacacagagaaagacgcggaggaaaggcttccgaaagcggcggctgcaaaagaacgtctttccgagatcaacagcggtgttgagcttcgtacatatgttgcagacggcacagttgaaacactcagaccgctgatcgaagaggcggatgccgtcattgatgcaacggataactttgagacccgcatgatcatcaatgaccttgcgcaggagacgggtactccgtgggtttacggcgcttgtgtcagcagtcagggcatgtatatgacgattattccccaaaaaacgccatgccttgcctgcctgtttgaagatgttccgattggcggggctacatgcgatacgtcggggattatttcgccggccgttcaaatggtgtcggcttatcagcaagctgaaattttaaaaatcttaactggacagcaagaagcgcttcaaactgcttttgtcacgtttgatttatgggcgaacacccattatcgcatgcagatcggccgcaatgagaaatgtccttcatgcggagaaacgccggtttatcctttcctcagcaacatgagccaaaagaaagccgacgtgctgtgcggaagagagaccgtccaaattcgcagcgaaatgttaaaacggctgcctaaagaggagctcatgaaaaagctttcggtcatcggaaaagtggatgcgaatgattatttgctgcatgtacaatatgaggcgttcagaatcgttattttcaacgatggaagagcccttgttcacggcacaaatgatataaaagaagccaactccatattggcgagagtcatcggaatgtaacaacaggaggtttttttaaatgattgaaaaaagaacgcccattccagtttttgaagccgctgcgcgtgtctctcagcaccagaagctgggagatgcagagtggattcaccttgaggagagtctccatagatttttagccgaagatgtcaaggctgatcacgatgtacccgcttttgaccgttcgccatacgacggctttgctgtccgagcatgcgatacagccggtgcttcgggggaaaatccgctgcaattcgaggtggttgatcacattggagccggggccgtatcggataaaaagctgggttcttttcaagccgtcagaattatgacgggagcgcagattccggagggcgctgatgcggtagtcatgcttgagctgacaaaaaccttctcggaagacggcaaaaactatatggtgttgaagcgctcactacagccgggagaaaatatatcaaaaaccggagaagatgcgagaaaaggatcagttcttgtgaaaaaaggaacccggataacgccgggtgttgtcgctttgcttgcaacattcggatatgcagcggttcctgcagtcaaaaagcctgtggtaggcatcattgccaccgggacggagcttctgaatgtcagcgatcctcttgttcccggaaaaatccgcaacagcaatgcaggcatggcggccgctcaggttgaagaatcaggcggaaaacccctttatttaggaaagatttctgatcaatttgacgaaagctttgcagcggtggaaaaagctttggacaaggtggattttctgattacgaccggaggggtatccgtaggggactttgattttctgccggcaatttacgaaaagctcggtgccgaggtcctgtttaataaagtggcgatgcgtcccggaagtgtaacgacggtcgctcaattaaacggcaaattgctgtttgggctgtccgggaacccgtcagcctgcttcgttggatttgagcttttcgtcaagccgtccctgcgcacctggctgcatcatccgaagccgtattctttatgtgcagaagcggttttagccaaggattttccaaaacctaacccgtttacgaggtttgtccgctcgtttgtatccattcaagacggcgcgcttcaggcggagcctgtcggtctggataaatcgagcgccgtaacgtctcttgcagatgccaatgcgctgatggttttgccgggcggaacgagaggctttgaagccggggcaagagtgcatgttcttttataccgggatgagaacggaagtgaacagctgtggccgcacattttccaatcctccagatcgtagggtaccaaaacagcggcaaaacgacgttcgttgaaaaattggcgggaaagctcgatcagctaggagtcaatgttggctgtctgaaacaccacggacatggaggagaaccggacgcttttgccgaagggaaggattccgaccgcttttttcgggctggagcggctgcgtccggcgtagaaggtgcgggcgtttttcagcttacggcgcgcggcgagtggacgcttgatcaactgattgccgcttacggcgttttagcagttgagtgtctcctcatcgaaggatttaaacatgcgccatatcaaaaagttgtcatggtcagaaacgaagcggactgccggctcctgaaggaattggacggcatcatcgccgtcatttaccagcagagcgagccgaaaacagatgttccatcctttcatattgaagacccgggtgccctggcttttattctgaatcatctaaaggaggaaggcgtttgtctgaacgatttatcataacaaaagacccgattgtcatcgaagatgtcgtcaaaaaagttgaaagaagggaagccggtgccgtcacgacgtttatcggaacagtgagagaatggaccaacggaaaaaagaccctctatctcgaatatgaagcttatgttccaatggcggtcagcatgctcgctcagatcggcaaagaaatcaatgaaaaatggcccggcacagctgcagccattacccatcgcatcggcaggctggacatttctgacgcggccgttgtcatcgccgtgtcgtcgcctcaccggaaagcggcgtatgaagcgaatgaatatgcgatcgaaagaataaagcaaatcgtcccgatttggaaaaaagaacattgggaggacggcgagacttggatcggcgaccagcttgagacaactgaatacccggaagggaaaccggatattgaagaggcggcttccggcagagaaagaggtgctgaccattgattaaaattttgctgtttgcccagcttgcggaacaagcgggtgcgcagagtatcgatatagatgaagaaaagacgacaacagacgagattagacagtttttaaaagaaacgtacaatcttcaggggacggaccgggcgatgatcgctgtgaacgaagtgtacagaagaggaaacagtgaggtcgagtcgggagatacggttgcttttattcccccggtcagcggaggatgagaacgtcggtcggttcaggcataagcctgtcaccgaccgacgttttttttagaaccgttctctatataaagaaaacagccgcgccgttctttcgaaatgtttggttctaatttttgaatcaggtcataaagctcactaatacggtgaacgttaaaattggttctttccttcagtttcattttcagttcttttgtcgttacaatttctcctttttgctgtttaataatgtctacgcaatgtgctgcataatactctttattggaacgtctatgtcgctggatttgtctgtcaagttctcccaaccttgcataaatcccttcgcgttctttccggaagtccttccagattttttgttccaattcacctaagaggagaagccgtttttttaaagcctctcttttcgacattgcaatcaactccgtcattcataatttgataactttttctattattttacatcatcttccttcattcatcaaaaaatttcctttgacatcgagaaactattttttatcggctgtcacattttaaacaggctttatttcaaaccgaagaagggggaaaactccataataagactgaattttttaaaaacggtggaattttatttcgtaaaccgatatattagatgatgtgtccttgttttacatgaattggaaaggtgctggtgctaatggagtcccttaaaaaactaaaagatttttattggccttataaaaaaatgtttttatggtcgattgcgtcgatgcttctaatgacggcgattaccgttgtttatccgattattctgcaaatgacaattgatgaagtaattctcggcggaaaatacggtttggtcatatggatcagcctcgggttcatcgctgtcatggcggcgaagggcgcagccactttttttcatcagtatctcggagatatgttcggaattcgctctgtctaccggttaagaaaagagctgtatgcgaaattgcagcgtctgccgttcaaatattacgacagcgctaaaacgggagatttaatgtcaaggcttacggcggacgtcgaaggcatcagattctttttatctttcggctttgctgaggcgattcgatttatcctgcttgtcactttcagtctgtctgtcatgttttcttattctgtgccgctgactctggttacgattgcttctctgccgtttttaggagcggccgtctaccggtttgataaaaaagtgcatcccgcttttcggaacataagaaaatcattcgcccgtttaaatacgaaggttcaggaaaatatcagcggcatgaacaccgttaaatctttatcaaaagaagattttgagattcaaaactttactcattcaaatgaccattttcgaactaaaaatttaaacgcttcgtttatcatgtcgaagttctttccgctgatggagtttatcggcaatatctgcctcgtggctctgctgtcgttcggcggctggctcgtgatgcagaacagcttaaaaccgggtgagcttgtcgcttttttcagtctcgtcaattacttgatgtggccgatcatgaacctcggttatgtcatcaacctgttttcacaagcgaaagcatcgggagagcggctgctggaaattcttgatgccgaggaggaaatcaccgataccgaacaggcggtgaaaagcggcagactgaacggcgatgtcgcattcagcgatgtttcccttcaatatacaaaagaaaatgcggaagcattgcatggggtgtcttttcaggctgagcgcggcaaaacaattgggttaatcggcgcgacggggtcaggcaagagcagcatcattcaactgctgagccgcttttatgaaccgacatccggccggatcacgatcgacggcaaaccgcttgaacactactcattaaagatgctgcgctccaatatcggcgtcgttccgcaggaatcgtttttattttcctcaacgatcaggtcaaatatatcgtatggaaagcctgatgcatcgatggatgagattatcgaaagcgcgaaaagagcccaggctcacgattttatcatggagcttccgaatcaatatgatacgatgctcggcgagagggggctcgggctgtccggtggccaaaaacagcggattgcgattgcgagagcgatttgtatgaacccgggcattctcatcctggatgattcgacgagtgccgttgacatggaaacggagcaccgcattcaacttgcattgcgggaagtgatgcgggatcggacgactttcatcatcgctcacagaatctcatccttaaagcatgccgacgaaatccttgttctcgataaaggcgtagtcaaggaaaggggaacacacgaacaattaatggaagcaaacggtttatacaaacggatttttgatttgcagtataaagatcaaaatgtgttgaatgagccgcattttgcaggataggaggctcttgctatggaaaaccaggcgaaaaaacaaacgttgatgaaccggtttttttatacttcagaccaaatcattgaaaagccttttaactgggcgcagatgtggaggctgcttaaatatttaaagccctaccgaaaaaatttgctgccgctgtcgtttttaacggtcatgatctcggcggcgatccggctggcggtgccgattttgatcggcgtctatgcgctcgaccaagcgatcgcaggccgggatatgaatcttcttgtgattctgatctccgtcatcagtgggttgtatcttgtcaattatgttagcaatgtgctgagaatccgctggatgaacaagcttggccagcatgtcatatatgatctcagacagcatttgtttacgcatgttcagcggctgtcgcaccgctttttcgacgagcgttcggcaggttcaatccttgtccggatcatgaatgacatcaattctttgcaggaactgtttacgagcggagtcatcaatttattgatggatattttgcttctttttggaattgtcgtcattctgttctcgctcagtcctgagctgaccatcgccattatggtgacgctgcctgtgatgttcttcatttctactaatctcagaaggaaaatccggcgatcctggcaaaaggtgcgcttaaagcagtccaagctgaattcccatttgaacgaaagcattcaaggcatccgggtcactcaggcatttactcaggaaaaagagaatatgatgtattttgaaggcgtcaacagtgagaactttgaagcctggcgggaagcgacgaaaaaaaatgcgactttccgtccgcttgtagaaatgacaaacgctgtcgggacggccattttaatctggtacggctcaagcttgatcatcaatgaaacgatcacgatcggtgtatttgtatcgttcgccttctatctcggaatgttctgggagccgatttcaaggctcggccaagtctacaaccagctgttgatggggatggcttcgtcagagcggatctttgaatttctggatgaaaagccgagcgttgcagacaaggaagatgcggtcaaaataaaagaattaaaaggccggatcgaatttgaacaggtggaattttcttatgacgggaaccgcaaggcgctgcacagcatttcatttgagatacctgcgggatcatcgcttgcgcttgtcggacatacaggatcagggaagacgacgatcgcaaatctgatcagcaggttttacgatgcaacaggcggggctgtcaaagtggacggtataccgattaccgatatctcgctttccgatcttcgttcgcaaatcagcatcgtgctgcaggacacgtttattttttccggaacgattatggaaaatattcgttttggccgtccgaacgccgccgatgaagaagtgatcgaagcagcaaaagctgtcggagccgattcgtttatttcagcgcttccgaatggatacgccacagaagtggaagaacgcggcaatgtattatcggcaggtgagcggcagctcatttcatttgcgagggcgcttctggcagatcctcgtattctaatccttgatgaagcaaccgcaagcattgacacagaaacggaagtcaaaatccaggctgccttgaaaacactgctccatggcagaacggctattatgatcgctcacaggctttcaacgataagggatgcggataaaatcctggttcttgaccacggccggaaaatagaagaaggaaatcaccaggaattgatcgggaaacgtggaatgtattatgagctggtaaaagcgcagtatcaaatgtttcagcgaaactaaaaccgtccgcgccgcaccttctaagaatgcggccggggcgtttttttgagaacagttgtgaaacattttaggacattctgcgtataaactggtaattcattttttaagggggatacatatggaaacgaatttagaaactgaaaaagtaaagaatccatcattgctcggattgattacccggcccggagaacagttcgagagaatgagagaaaagccggctttctggtttccgcttgtcattgttttaatcttgtcggttgcgggagcgtatatgctcagcgaaaaaacggcgttgtctaccgatttgtcggaaatgccggatgctgaagcatttcaagctgctatgaagggaatcggcatcatcggcgggatcttcggctttgtgattgccttgctgatcagcgctttaatttattggctgattgtcaaaatcggaagaggaacaaccaattttgttcacatgttttcgctgtctgtttttacatattttattgcggctatcggacaattcataggcggactagtgatctattattcaaatatcgatcccacgatcgtcgtcacgtctttaaacggcatcatcccggcagacgagccgctcaaatcggtattgggtgtatttgatattttcacgatctggtcgctctcattggttgccctgggtctccaaaaggttgggggcatctccaaaaaagcggcttggaccggtgtgatcattttatttgtgatctccattctgctcgctttaataggcggtatggcgatcaatttcttcgattcatttgaaggagcaatgtaaatgaaaaaaatatggatcggcatcgtcattgttggggctgctgcgctttttatcggactcaacctctaccgctcggttcaaacgagcggaggggctgaagaagcggttcaaaccgtgaaattggaagaaaaagagatttcttctgaagtcatggttccggggacccttcagtttgcaaacgaacaatacgaatattttgaacctgaaaaaggagaaattgccgacatcaaagtaaaagaaggcgataaggtgaaaaaaggagatgtgcttttcacctatacaaatgaagaaattcgcctggaaaaggagcaaaacgctttatccattcaatcgaaggatctccagcttgaacaggttaagcgaaaaatcagcagcctaaaaagcaaggaagacgagctgaaggctgagctcggagcggaaaaagccaagaggcaaattgatgaagaacggtcacagcttgaaatggaagaaaaatcgctccagcttgaactgaaacaagccgacctgcaaaaggaaacgctcgagaagaaatcggcagcgctgcaagtgaaaagcggcattgacgggacggttattaccgttgacaaacaagccgctgcaaagcaatcggatattcaaaagccggttatacatataggtaacgaggacaagcttgtcgttaaaggcgtgctctcagagtatgacacattgaaagtgaaaaagggacagaacgtgaccatcacgtcggatgtcatccaaaataaagagtggcgtggaagggtatcacaagtcggattggttcccaaagaagaggcgtctgcaggtgctgcgggaacaaaggagcaagctgttcaatatccgtttgaagtcaaaataaaaggggagcgtcctaaagcaaagtccggctttaacatgattctcaaaatccagacggacaaaagaatcgttcaggctcttcctgaagatgccgtcaagcaggatggtgatcaatcatacgtgtttgccgtaagagacggcaaggcaaaacggatcaatgtcaaaaccggtgagaaagcagacggcctcgttgaaattaccggcggtctgacaaacaaggacccggttatcgcaaacccggccgaggatatgaaaagcggaacggaagtgaagcttcaatgattgagctttccaaagtgaaaaaaagctaccaaatcggaggagaaaccattgatgttctcagggagatcgatatgaaaatcgagccgggagaatatctgtccatcatggggccgtccggttcgggaaaatcgacgatcatgaacattatcggctgccttgaccgcccgacatcgggtatttacaggctggacggcgaggatatttcatcatacggcgaaagggagcttgccggtgtcagaaaccgtttaatcggttttgtttttcagcagtttcagcttctgccgcgcttgaatgccataaaaaatgtggagcttccgatgatttacggcggcgttccaagaaaggagcggcgggagcgggctgaacgggcgctcgaaaaagtcgggctcaaggacagaatgcgccatatgccgaacgagctttccggcgggcaaaaacagcgtgtagccatcgctagagcgatcgtcaatgaacctaaactgatattggctgatgaaccgaccggagcgctcgatacgaaaacaagccgggacatcatggagcaattcaccgaattgaatgaggaaggaacgacggtggtgctcgtcacacacgaacctgaaattgcggactatacaagccggaccatcatggtgagggacggtgtgatcgtctcgccggaaacagagcggagggggacggtgcaatgaatctcatcgaaaacttgagaatggctttaagttccatcctttcccataaactgcgatcgattttaacaatgcttggaatcattattggtgtaggctccgttattgtcgttgttgcagcggggcaaggaggagagcagatgctcaagcagacgatcagcggacccggcaacacggtcgaaatctattatcagcccagcaatgaagaattaaccgccaatccgaacgcctacttagacgccggcttcaccgaagaagacatcagaagcttaaagtcactcgaaggcgtgaaacatgtcgttgcgaaaacaaccgagtccatgaatgcccgcttccgggatgaaaatacggatgccgctgtaaacggcattaatgacggatatatcagcatcaattcgatggaaatcgaaaagggaagagaattttcagaagaggattaccttgctggaagcagggtcgccattatttcgccgaagcttgcggaagaactgttttctcagcagtcgcctctcggccgtgtcgtatggataaatagccagcctgttgaaatcatcggcgtattgaaagaagaaaccgggctgcttgcattggggatgaatgagatgtatgttccattttcaatgttaaaatcgtccttcggcatcagcgactatgactctgtctccgttcaagctgagtctgccgacgatctgcaggccgtcgggaagcgggctgcagcggccgtcaacaagaatcacggcacttcggactcgtacgaagtgatgaacatggaggccatagcggccggaatcagccagattacaacaattatgacgatgttcatcggttcaattgcaggcatttctttactcgttggggggatcggcgtcatgaatattatgctggtgtcggtcactgaacggacgagggaaatcgggattcgaaaatcgcttggtgcaacaagaggccagattctgatgcaatttttaatagaatcgtctttaattacactgatcggcggggtgtttggcatcggccttggatacggcggtgcagccctcgtatcgttttttgccgggtggccgccgctcgtttcctggcaggtggtcctcggaggcgtcctgttcagcatggcgatcgggattatctttggactcatcccggccaataaagcggcccgccttcatccgattgatgcattgaggtatgagtaagatggttgagaaacttgaagcagttgcaggaaaaacccaaatgcacgaatggtccatgccagtacgtcagactatcgacaatattgaaaccgcctgagcaggcggtttttttatggaaaagcaaatttgatcaggcatatggtgtatggatgttccggttaaacatgcctatataaagggatgcttggtgcttggtggctacattccggccgagaagcctctattaaatctacttggaatatgcatcagcagccggagaacgatggatcggcatttcaattatatttatatccatgttgcggcctgtcttactatatcaatttatagaaaatattcagtaatcggaaacaggatacagatttgctgtaaaacctcatgcggtgagcatggggttttatcctgtgacctgaatgatgtttgaaggaatagataataataatgtcacatatttttgcggatttttatagtttatacagtttacaaacggtacatatcacgttaatattttaaaatgtgaaagattttgatggttattgaatgaatttgaaagatttttgttgagttatgtcgaaaaagcgtttacaatgaaattgtaagcttaatgaaggcgtttccaaaaggggtgataatgtgttgactcccgaacggcatcagctgattattgacgagattgaaaagcatgatgtcgtgaaaatccagtacttaatgaatttaacgaacgcatctgagtcaacgatcagaagagatttgtcgacgctggaagcccgcggatatttaaagcgtgttcatggaggggcatcaaggctttccgatattcgtacggagcctgacatgctagagaaatcatccaaaaaccttcatgaaaagcgaaaaatcgctcaagaagcggcctcacttcttgaagaaggcgattgtatttaccttgatgccggaacgaccacattgcaaatgatcgattttatcaatccagagatggatattatcgtggttacaaatggagtcatgcacattgaggcactaggtaaaaaaggcattactttttatttattaggcgggtatgtgaagtataaaaccggagcgatcgtaggcggttcggctttatcagccatcagccaataccggtttgacaaaagcttcatcggcgtcaacggcattcataaggaagcggggttcacgactccggatcctgaagaagcgcttttgaaaacaaaagctgtcaaccaggcgaaaaaagcatttattttagctgacgtttccaagtttggggaaatttcattttctgcctttgccggtttagacgaagcaactatcattacagcaggatctgcaaaacattcatttgataactatcaagaaaaaactgtcgtaaaggtagtgaaaacatgatatacactgtaactctcaacccatcggtcgactatattgttcacgttgaagaattttctgtaggcgggctgaatcgttcagtctatgacacgaaatatcccggaggcaaaggaatcaatgtctcacgcgtactgaacagacaccatgtaccttcaaaagttctcggttttatcggcggttttaccgggggatatatcaaatcatttctcgaagaagagaagcttgaaacggcttttcatgaggtgaatggcgacacgcgcatcaatgtcaaattgaagaccggggatgagacggaaatcaacgggcaggggccggtcatcagcgaagaagatttcgcggcctttttagaccagttttcagcgatgaaagaaggggacattgttgtactggcgggcagcattccttcatcattgccgcaggacacatatgaaaagattgcggaaaaatgcaaagagcaaaatgtccgggttgtcgttgatatttcgggtgaggcccttttaaaagcagcagaaatgaagccgcttttaatgaaaccgaaccatcacgagctcggagaaatgtttggaacaactatcacctcggccgaagaagcggtgccttacggaaagaaactcgttgaacgcggggctgaaaacgcgatcgtttccatggctggagaaggcgcacttttatgtacaaaagacggtgtctaccatgccaacgtacctaaaggaaagctcgtaaactcagtcggtgcgggggattcagtggttgcaggctttctcgcaggcattgaaaaacagcttggcatcaaagaagcttttcgcttaggagtcgcttcaggaagcgcaactgccttttcagaggagctgggaacggaagagctcgttcacaagctgcttccggaagttcaagtcaaagcgatataaaggaggaaaggttatgaaaataactgagctactaacaaagcatacgatcaagttaaaccttgagagcagccagaaagaaaacgttatcgaagaactcgtcagcgttttggatcaggctggcaagttgaatgataaagaaggctacaaagaagctgtgatcaaccgcgagaaacaaagctctaccggtatcggcgaaggcatcgccatcccgcatgcgaaaacggcaagcgtcaaagagcctgcgatcgcgttcggccgttcaaaaggcggcgtcgattatgaatcccttgacggccagccaagccatctcgttttcatgatcgccgctacagacggtgcaaataacactcacctcgaagcattgtcaagactgtcgactttgcttatgagggaggagattcgcaaacagctgcttgaagcttcatctgaagacgaaatcatcgacatcatcaatcagcatgataaagatgatgatgaagaagaagagcaggccgaagaggctcctgcaccatcagcaaaaggaaaaatccttgcggttacagcatgcccgacagggatcgcccacacgttcatggctgcggatgctttgaaagaaaaagcgaaagagcttggggttgatatcaaagttgaaacgaacggttcaagcggtattaaaaatggtctgacggcccaggaaatcgaagatgccgttgcgatcattgtcgccgccgacaagcaggttgaaatggaacgctttcaaggcaagcatgtcattgaagtacctgtaacagcaggtatcagacgtccgcaagagctgattgagcaggcgctgaaacaagacgcgcctatctatcagggtaaaggcggcggtgcaaccgcttctgaagacggagctgccaaaggaaaaggcggcggtttctacaaacacttgatgagcggtgtcagcaacatgctgccgttcgtcgtcgggggcgggatcttagttgcgatttcgttcttctggggaattaacgcgaccaagccgggagatccgacttataatgagttcgctgctgtattaaataatattggcggaacgaatgcacttggattaattgtcgctgtattggccggatttatcgcgatgagcattgcagatcgtccgggatttgcgcctggtatggtcggcggtttcatggcgacacaagctggcgcaggtttcttaggcggcctgattgccggtttcttagctggttatattgttgtcctgttgaaaaaagtgttcgctggtctgccgcaagtgcttgacggtttaaaacctgtgctgctctacccgctgtttggaatattcttgaccggaatcattatgcaatatgttgtcaatacgcctgtcaagtacattatggacggcatgacacattggcttgaaggtcttggaacaggaaaccttgtcgtaatgggtattgttttaggcggtatgatggcgattgatatgggcggtccgatcaacaaagcggcctttacattcggtatcgcaatgattgaagctggaaactttgggcctcacgcagccatcatggcaggcggtatggtgcctccgcttggaattgcccttgcaacgactttctttaaaaataaattctcaaaacgggatcgcgaagccggaattaccaactacgtgatgggcttgtcatttattactgaaggtgcgattccttttgcggcagcagatccggcacgcgtcattcctgcttgtatcatcgggtcagcagttgccggcggtctgtctcaatttttccatgtcacactgcaagcgccgcatggcggaatattcgttctcttctttacgacgaatcatgcgctgctgtatctcctcagcatcttgatcggtgcggttgtgacagctttgattctcggcgttttgaaaaagccggttccaactgaaaaataagtgctgaaagtgccacagtaatccctctcgtggcactttcttttttactgtttttgccggaagtgagcgcggggattatgtattcagcgggaacttgtgataaagtataggaaagcttttattttggcatgtatgctgtgacagactgtttttaggaggaagcgttttgactgaagaaaaatccaccaataagaaaaactctctctttgaatgggtaaaagccattattattgcagtcgttctggcgttattgatcagggcatttttattcgaaccgtatttagtggaaggtacgtcgatggacccgacgctgcacgacggagagcggctgttcgtctataaaacggttagatacgtaggcgaatttaagcggggagatatcgtcattatcgacggcgacgaaaagaatgtccattatgtaaagcgcttgatcggcctgccgggagataccgtgcaaatgaaagatgacacgctgtacataaacgggaagaaggtgtcggagccgtatctttcggaaaacagaaaagaggcggaagcagtcggcgtcaagctgacgggcgactttggccctgtgaaggttcccgaaggcaagtatttcgtgatgggagacaatcgccagaggtcaatggacagccggaacggcctcggactgattgataaaaaacgagtggccggaacttcgcaatttgtgtttttcccgtttaacgaaatccgaaaaacagactgaaaaatgcctgatgtccatttggacaatcaggcatttttgcttgatttatgcggataatgatgccagcactgcgataaacagtacggtaacgaacacagaggccataatcagaagaacgctgtacaagattctgatttccgcggcttcttttccccgttttgacagcattcgtttcgccgcgatatgaacgaacacgtaaatcatggcaatcccgatgtaaagccccagatcccgtgctgtaaagccggttatggcaagatagacccctgcaaaaaaaataaacatgcagtattccgtcaaagtgataagcttcatggtttcctccgtctaacgatccgagttttcttcaaatatcacctttttataatatatcttttggagccatcccacaaggaggccgaagccgatcagcagacaggaaaatataaaaaagtcagcggtccacatatcaaaccctttgaaaagcccgatagacatcgtagaaatcaccatggccactgacgcgaaaagcgcttggcgcggcctcgaattaatccatctgatgatatcagggtcatctttcaatttcattattccttcccccattcttcattaattgtaacatattgtcacaaagaaagtggaaataagcgtttttttgatatatttttctttcaaactttatcgtaaaaaagcaaagcatttctcttgcggaattttcgtgttatactcattttaatgaagtatagatggaggatattaaatgatagctgttcaaaatgtcagcttgcggtttgcagaccagaagctgtttgaagatgtaaatattaagtttgcgcccggaaactgctacggattgatcggagcaaacggcgccggaaagtccacttttttaaaaatattgtctggcgaaattgagcctcagacaggcgaagtccatatgagtcctggcgaacgtcttgccgtcctgaagcagaaccactttgagtatgaagagcatgaagtgttgaaagtcgtgatcatgggacatagacgactttatgaagtcatgcaggaaaaagacgcgatttacatgaaacctgatttttcagatgaagacggaatccgcgccgcggagcttgaaggcgaattcgccgagctgaacggctgggaagccgaaggggaagccgcgatcttattaaaaggactcggcattcctgaagaacttcatacgaagaaaatggcagatttgggcggctctgaaaaggtgaaggtccttcttgcacaggccctgttcggaaaacccgacgtccttcttctcgatgagccgaccaaccacttggatattcaggcgatccaatggctagaagagtttttaatcaattttgagaatacggttatcgtcgtatcgcatgaccgccactttttaaataaagtatgtacgcatattgccgacctggattttaacaagattcaaatttatgtcggaaactatgatttctggtatgaatcaagccagcttgcgcttaaaatggctcaggaagccaataagaaaaaagaggagcagatcaaacagctccaagagttcgtcgccagattcagcgccaacgcctcaaaatcgaagcaggcgacatcgagaaaaaaactgcttgaaaaaattacgcttgacgatattaagccttcatctcgcaagtatccgtatgtacatttcgcacctgaacgcgaaattggaaacgatgtgcttgttgtcaaagacctgtcgaaaacgatcgacggcgtcaaggtgcttgactctgtcagctttatgatgaataaagaggataaaatcgcctttacaggccggaacgagctagccgctacaacgctctttaaaatccttgccggggaaatggagcctgacagcggatcgtttaaatggggcgtcactacatcccaagcgtttttcccgaaagacaacagcgagtattttgaaaacagcgatttaaaccttgtcgactggctccgccaattttcgccgcatgaccaaagtgaaagcttcctgcgcggatttttaggccggatgctgttctccggagaagaagtgctgaaaaaagcaagcgttttgtcagggggagaaaaagtccgctgcatgctgtcgaaaatgatgctgtccggcgccaatgtgctgatgcttgatgagccgacaaaccatttggacctcgagtccattacagcgctgaataacggtttaatcagctttaaaggcgccatgctgtttacatctcatgaccatcagtttgtccaaacaatcgccaaccggatcatcgagatcacgccaaacggaatcgtcgataaacaaatgagctacgacgagtttttggaagacaaaacggttcaggacaagcttgctgaactttacgcgtaatgatagaaaacccgccttaaaaagcgggtttttttttataaaaaggagatggttgctgtgtcatgccgaaaggctcttgagcaatatattcaagcaacaaacacacatgagtttgagaatgtcaaagccctccttgaccccggcgctgtgtactggttttcggatcaaacgtgctcgggctttgaggagattcagcgttattttgaaaacgcctggaagcaaatcgaaaatgaagtatacagcgccggtcatgtcagctggatcacggaaacggacgaacaggccgtctgtctttatacatacgaatggaaagggttatataggggcgaaccggttcaaggggcaggccgtgcgacaaacgtatttgtaaaggacgagtcaggacgctggaaactgaagcatgaacatttaagcagtttgcccaagcgatgaggcggcggagcatggacctgattttcagctgttacagccgccatgcatgtacagggaagtttaggattgcgggcggcatgcggacacgatataaaaggacctcagaagttttctgaggtctttttttgcggaaggctttatatcgcccagttgccgtttctgaatatcggctctctttttccgtcagcagtgattccgtctatattcatttctcctgaaccgatcataaagtcaacatgtgtgatgctttcgtttaatccttctttcgccagctcctcgcgcgacatctgttttccgccttcgatgttgaatgcgtatgcactgccgatcgcgaggtggtttgaggcattttcatcaaacagtgtgttgtaaaacagaatattggacttggaaatcggcgaatcgtgggcaacaagcgcaatttcgcctaagtagtgtgaaccctcatccgtttcgatcagctcttttaaaatttcttcgccttgtccagctttgacatccgtaatccgtccgtttttaaatgtcagtgtaaagccgtcgattaaattgccgccgtagcttaacggcttcgtgcttgaaacggtgccgttcaccccgtcttttttcggagcagtgaatacttcctctgtcggcatattggccatgaactcgacgccgttttcgtttgtgcttccggcgccgacccacagatgcttctcgggaagctcgatcgtcaaatctgttccctttgcttggtaatgaagggcgtgataatgcttgtcgtttaagacgcttactttatcgcgcaaggtttgatcgtgatctttccacgcttgaacgggatcttcacggtcaacgcgggtcgttttgaaaatctcattccatagcttttgcacggctgtctcttcatctgcctcagggaatacttttttcgcccaggccggcgaaggcgctgcgacgacagtccagctgactttatccgattgaatcatttgcctgtatgtatgcatcgcttttcctgcggctttctgctgtgcggagatttttttggaatcgatgcctttcaaaagatcaggacttgaagagacaatggaaataaaagcagcgccttctttggcgagcgtctcaagcccctttgcttcccattcagggaactcttcaaaggcttccgcaggagccagctcgtatttcagccttgtgacctcatcatcctgccagcggaccgtcacgtttttcgcccctctttgataggcgcttttgacgaggagccgtgcaaaatcgcgtacttctgttgacgcgttgatgacgacttgctgtcctttttgaacgtttacgccgacttcggccacaagctttgcatatttgctcagtttatcagtaaacgaattcattggcaaaacctcctttattgtccataacatcatatcaaatatttgattgaaaagaaaaaaagaagcagcccggttcaggctgcttcttttttaacggttgattttggccgtttggccggggggcgagcttggcatgtttgcaagggagatgctcatccccccgagaataataccgcttaaaataacggtgatggccaggcgtcttcccatatctctaagcatggtcttcctccttatcgtttctccattcctcacgatatgaaagaagccgggaaaaaagacgcgaaaacaaaaattatttagccgctttttgcaatttatcgatcacttcgagagaacgacccgttccgatagcgacagattcaagcggatttgcagcaacatgcacgggcacaacgatttcctgtgacagccattctttgatgccgttcaaaagcgcgcctcctccggtcaaaatcacgccccggtcgacaatgtctccgctcagctccggaggacagtcttctagcgtcgctctgatggcttcgataatatgcaggagcgattcgcgcatcgccttctgaatttctttcgattccagggtaatcgttttcggcaggcctgtaacaaggtcgcgtcctctgacttccatcgttttcgtctcatggtcaatcaatgcgtagccgatctcaattttgacttcttcggccgtccgttcaccaatcagcaggttgtatttttttctgacgaatgacacgatgtcttcatcaagctgatcaccgccgatccggatcgagtggcacgagacaacgcctccgaatgaaatgatcgccacttctgtcgtgccgccgccgatatcgacgacaacgtttgcgacaggttcatcgacaggcagatctgcgccgatggcggcggcgacaggctcctctatcaaatggacttgtttggctccgcagtttttgacagcatcgctgatcgcgcgcctttcaacagcggttgagccggacggcgtgcagacgacgacgctcggctttctgaacgtaaagccgatgttctttccggcttttttcataatctgcttcaagaggtctgtcgtcatgtcataatcggcgatgactccgtctttcatcggcctgaccgcgacgatttttcccggcgtttttccgatcatgtttttggcttctgtgccgaccgccaatacgctctttgtttccgtgtccacggcgacgacggaaggctcatttaaaatgattcctttgtttttgctgtaaaccaatatgttagctgtgcctagatcaattccgatctcgattgtttgaaacatgttttcacccaatctctatttaaaatttttccgaaaaacgaaattttcttcgtgctgaaaaaatgaatttcatttaaattttctcaaatcatcggcgatttttgggggtttgtgacgattttgaaaccaatctgtaaaatgctgtcctcatatttacatgatgagaaaattatttcatttttatgaccggatttttgtcgaagaaacgcttgataagggaaacctttttcagtcttcattcgtctatcgttatgctaagacaatatcttagaaaaatagaaacaatagaggaagtaggcgaaagttttgaaagcaataggagttgtgagaaaagtagacgaactcggcaggatcgtgatgccgattgaattgagaagagctttggatatctcgatcaaggacagcatcgaattctttgtcgaccaagataaaatcgtcctgaaaaaatataaaccgcacggtgtgtgtctgatgaccggtgaaatcacttctgaaaaccgcgagtatggaaacgggaaaattacgctcagtcctgaaggggccgaattgcttttggaagaaatcaaagctgccttaaacggagtgaaagcataacattcgacgcccttcatcagaagggctttttcttgcgccgggagcagataaaaccgccgtcactgaaaaattcagccatagagacgataaatacttcgaacaatcctctcaaatgtggtgtaaagaatgttacaattgactgagaaatacaagtggcaggtgggggtatgaaaagatatcaaggacgaatcattgcaaccgtgctggcaatgacttttatcatgttttggaattttttattctatggggtgttgggaaataaaatcaattggacggttgatctgctgtttacgctggtgacattaatcagcgtttggtggctcacactttatatcgatgagtcaaatcagcttgtctataaattgaaggaaagcgaaaagaaatataaagagctttcctcagaaaccaaccgcataatggataatcttcaggaaatcgtctttcaaacggaccggataggatacattacatttctgaatcaggcgtggacaaccctgaccggatacagtgtcgaagagagccttggaacgatgtacaacgattattttgaccatgaagaacggatctcgaatcacctgatcgcccagttgaagaacaaggagcccgaaggcaggatcgaggtgctctaccatcgcaaagacgggagcaagttctggggcgaagttcactataaactttattataaaaacggtcaatttacgggcagcttggggacgctgactgatgtgacagaacggaaaaaagcggagatggaactgtttaagtcgaatcagcggctggccatgcagtctcaaaagctggcgatggccgggcagctcgcagcggggatcgctcacgaagtcaggaacccgctgacatctgtaaacggatttttgcagctgatgaaagcggaatatcctgaccggaaagattactttgacattattttctcagagattaaacgaatcgattctgtgctcggagaactgcttgtgctggccaaaccgcaccaggttcaatttaaaaagatcaaaatcaattcggttcttcagcaagtggcaacgcttcttgagacgaacgccgtgctttcccacattaagatcgaaaaagcgtttcagcacggggaggagtgggaaataaacggtgatgaaaatcaaatcaaacaggtattcatcaatttaattaaaaacgggatagaagcgatgcctgacggcggtaaaattacgatttcctcaaaggcagaaggagactgtgtgaaaatcagcatcaaagacgaaggcgggggcatttcccaagccgacttggcaaagctcggggagcctttcttctcaacgaaagaagaagggacaggtcttgggctgacaatttgcctgaatatcatcggcgcccacaacggagaaatgaaaatcgacagcaaattgggcgagggaagcacattccacattttgcttccggtcgataaaggtgcggcgtccgaagagaacgacattcagcaaggatgctgcagccgcgcaactataaaataaaagaggaaaaattccacttcatatgatagaatttgttcaagattgacccatggaggaattaccgatgaaaaaagaatttgcagtaattggactcggccggttcggcggcagcatttgcaaagcattgagtgaagaagggcttgaagtaatggcgatcgacagagatgaagatcgcgtaaacgaatacgccaaaattgcaacacatgctgtgataggagacactacagacgaatctgtgctgaaaaaccttggactgcgcaattttgaccatgtcattgtagcgatcggggagaacattcaagcgagcattttgacaacgctgatcttaaaagagcttggtgtgaaaatgattaccgtaaaagctcaaaacgattatcatgaaaaagtattatccaaaatcggagcggaccggatcgttcacccggagcgtgaaatgggaaaaaggatcgcccacaacatcgtctccaacaatgtgcttgattatctggaactttctgatgaacacagccttgtcgaaatcgcagcgaacggcaaactggccggaaatacactgcttgaccttgatatccgggccagatacggaattaatattgttgcgatcaagcggggaaaggaagtcatcgtatctccgcttgccactgaagaaattcagaaagacgatattttaatcgtcatcggctcaaatcctgacattgagagatttgaaaaaaaagtctttcaacattaaaatgccaccgattaaccgcgggaaccccacagcccgcggtttttttgatcttttcattgactgtttcaagcgattcggctacgatattgaaccatatacatataaaaaagagaggggacatatacctttggacaaagagatgttcattcgccggcttggcgccgccagtcatcgcaaaaaagcggaaactgtaattaaaaacggaaaaatcatggatgtttttaatcaggaatggttggagacggacattgccatcacagacggggccatcgtcggcttgggcgaatatgaggggggaaatatcattgacgctgagggacaaatgatcgttcccggctttatcgacggtcatgtccatattgagtcctcgatggtgacgccgcccgaattcgctaaagcggtgattccccacggtgtgacaaccgttgtcaccgatccccacgaaatcgcgaatgtctcaggtgtgaagggtcttgagttcatgttggagcaggctgagatgaccaggctgaacatttattttatgctcccttcttgtgtgcctgcggcaccattcgaaaaatcgggtgcgattttgaacgccgcggatttacatcctttttacagccgcgaagaggtgctcgggcttgcggaagtgatggactatgtggccgttgaagctggagagccggatatggtgcaaaagctcattgatgccgataaagcgggcaagcggatcgacgggcatctggccggcttgtcagccgggtttgtcaatgtctacagagcggcgggcgtgcttacagaccatgaggtcacaacacctgaagaggcgcttgaacgagtgagaagagggatgtacgtcatgctgagagaaggttctgcggcaaagaatacgcgtcatgttttacctgcggtcaacgagaaaaatgtgagacgcttctttttctgtacggatgataagcatctggacgaactggtcgatgaaggaagcattaactaccaggtcaagcttgccattcaagaggggcttgacccgtttctcgcatatcaaatgggcagcctgaatgcagcggaatgcttcgggttaaagacgaagggagcggtcgccccgggttatgacgcagatcttcttttcatcagcgattttgagaacgtgagcattacaaagacgatgattaacggcgtgatctggagcgggacagagcaaagccaatcgacgggcggcaaagcggcatccggtctgcttcaatctgtgcatctgtctgatttacatgagaacgatctgcaaattccgatcgttcaagagaatgaaatcagggttattgacattatccccaatcagctcgaaacaaagctgtccctggccaagccgaaaagcggagctttttttcagccggatctggaaagcgatctgttgaaaattgcagtggttgagcgccatcgcggcgttaaagaaatcggactcggcgtagtcagaggcttcggtttaaaagaaggcgccatcgcgacaaccatttctcatgattcccacaatttaatcgctgtcggtacaaatgatcaagacattttaaaagcgattgaacgcctcggagaaatcggaggaggcctcaccattgccaaaggagggaaggagcttcaatccgtcgcactgccgatcgccggcctcttgtcggacaaaccgcttgagacggtcaacgaaagcttgaaatctctccacgcggcaataacagagacaggattttcaggagcgtttaatccttttctgacgctttcttttttagcgcttccggtcattcccgacattaaaatgacaacggaaggattgtttgatgttaaagcgttcaggcatatcccggttcaaccataaaaaaacggatgcaccccggtgcatccgttttttgctgtatccgcatccgcgattagacttccataataatcggaaggatcatcggccggcgttttgttttttcatagaggaaaggagcaagcgtgtctgtaatctcgttcttaatttcagaccactgtgtcgttttgcgctccatcacttttttaaggtgtcctgcaatcagttcctgggcatcattgattaaatcaccggattctctcatatagacaaatcctctggaaattaagtcaggccctgcggacactttgaattctttcatgttgatgctgacaacgacaatgacgagcccttcttcggaaagaatccggcggtcgcgaagcacgatattgccgatgtcgccgatgccgcttccgtcaatataaacattgcctgacgggattttacccgcaactgaggcttcttcgcttgtcaaagcaagcacttccccgttgtccataataaagcagttttcctcaggaattccgcagtctgtcgccagtttgacatgcattttctgcattctgtattcaccgtgaatcggcatgaaaaactttggcttgatgaggcggagcatcagtttttgctcttcctgtccgccgtgtcccgaggtgtgaatgttagtcacagctccgtggatgacatcggcacccgcccggtaaagctggttaatcgtgcggctgacgctgatcgtattgcccgggatcggagatgatgaaaatacgaccgtatccccgggattgatggagatttgccggtgtgtgccgtttgcaattcgagatagagcagccatcggttcgccttggcttccggtacagagaatcgtcactttcccggcagggagcctgttgatttcattcgcttcaacgaaagtgtttttcggacacttaatatatccgagcgtttggccgatttcgatcgccgactccatgcttcgcccaaatacggcaaccttccgtccgtttgcaacagccgcttcgatcacctgctgcaggcggtggatgtttgacgcaaaggttgcgaagatgatccggccttcgacttttcggaaaatatcatcaatgctttctccgactttgcgctctgacatcgtgaaatcagggatttcactgtttgtgctgtctgacagcaggcaaagcacgccttcttttccgatttcggccatctttgtcaagttggcgggttcgcccaccggtgtaaaatcgaatttaaagtcaccggtatgtacgatgtttccttgcggtgtttttacgacaatcccgtatgagtccggaatgctgtgggtcgtcctgaaaaaagaaaccgacgtttttctgaatttgacgatatcgtcttcttcaatgatatgaagctttgtttggcgaagcaaaccgtgctcttcaagcttcttcctgagaaggccgatggcgagctgtccgccgtaaaccggaatgttcacctgtttgagcaggtacggaattccgccgatgtggtcttcgtgtccgtgcgtaataaaaagacctttgattttttcttcgtttttgactaaataagtgtagtcagggatgacatagtcgattccgagaagctcgtcttccggaaacttaatccccgcatcgatgagcacgatctcgtcctggaactggaccccgtacgtgtttttgccgatttccccaagtcctccaagggcaaatacagccgtttggtcatttttaacaaatttcattcattcataactccaatactttaaaattttcgctttgcttttcatattctaaaaaagcgccttcaacttgctgtataaactcaatattgtagttgtatggttttaatttagatctgacttcacgttcagattgagcttccacaaaaattgaatctgttttttcacgaacaggtacttcgtcattgcttgcttgataaaataccttatagatcatccaaatctctccttaactgccgattgttagactcgtctttctattatattcgaaattggctcataagaaaagcgcctgagaaaaaaaggacccttccacacgagtgaaggtccttttaggcaatcgactttctgcgcatcatgccattcagctgtttttttaattttttccgcagacggcgaagcatacgggttcctcctttctctgacttgtctgagtaacttccgtatctctttagttctattatatgatgaatccgtctattgttacatggatattattggcatgttgatttagttttgattttggagtgaaaaggttttctcgcgtacgcagtttttgtatgatggtacaggagaaccatcaatcatactagctaagggagaaggattcactgccatggataaaaagctgattttctttgatattgacggaacgatttatgatcacaataaacgcattcccgccaccgcaaaacaggccgtctccgatttgaaagcgcacggccatcatgttttcatcgcgtcaggccgtgcgccgtttatggtcaggcctgttcttgaagaactgggcatcgattcttttgtctcttataacggacaatatgtcgtttttgaaggagaggtcatttataaaaatcccattgccgagcagtcgttagaagcgctgcttgcgcattcggacagctgcggccaccccctcgtcttcatgggggaagaggggatgcgctctacaactgccgcccatccgttcgtcgatgaagggatcggcagcttaaaagtcaatccgccggaagaggatcgtacctactttaagggcagggacattttccaggtcctcttgttctgcacgcaagacgaggaagagcggtacagccggtttaaagagtttgatctcgtccgctggcacgagcgctccacagatgtgctgccttcaggcggatcgaaagcggaaggaatcaaaaaagtcattgaaaaacttccgttcgacagagaggatacttatgcgttcggggacggtctgaacgacctgcagatgatcgaatttgcgggaaccggagtagcgatgggcaacgctgtgcccgagctgaaaaaaatagccgactttatcacaaagcccgtcgatgaagacggcattcaatacgcggtggaagcgctcggacttttgaaatcataaaaaacggatcagaaatgatccgttttttttatgactttacctgcctacaggcgttgcattttcaggttgtttcagcgggttttctttgtcgatgtggtcgtaaaacataatgccgttcaaatgatcgatctcatgctggaatacgatcgccggatatccttttaagcggatgtcgatgttttcgccttcaagcgtcgttcctttgactcggatccgttcatagcgcggaacatatccgggaatcggctcgtcgacggacaggcagccctcgccgcttgtcaaatagcatctttgaacagagtggctgacgatcttcggattgaaaagcgcatagctgtatagtgtcccgtcttcgctttcggcatgaacggcgatcattcgtttattgatattaatttgcggagcggctagaccgacaccaggacgaaggttgtactttttagcgatttcggggtcctggctgtttttgacaaactcgatcatttcgctcagctgtttgatttcttcttcgcttgctggcaattgaacttcttcggcgacggttctcaaagcaggatgaccgtcgcggacaatgttttccattgtgatcaacatcttcactcccaacgattcattatgtaaagtatagcggatcttgctctttccgcgcaatctctgtgcatgataaaatgaccagcctaaaggaggctggtcatgacggatccatcaggggctagcagcctaaataagcggcccctacaataatcagcaaaataaagagaacgacgatcaaagcgaatgtgcggccgtagccgtatccataaccgccgccgtacccgtatccagggcagcaataaccgtacatataaagacctcctccgttattttacgcacagccttttctttttagtaggcatggcgtctaatataaactatgtaaaagtccaaaggttgtatagtcgaatgcccagcttcaaggaattttccctaaaggtttggtctaaaagcgaaggcggttgcataccgatctgatatcggcttgtccatatctttagacttctgttgtcaaacaagcgaattcattttatagtggaatttgtcgagattgggggaagttcatagtgaaattttcaaatatgcgggtgcccgcaggcatcgtcgttttttgcacggctgcatttgtattaacaggctgtctctggaaggatcctgtcgagtcgtttcacggctcgctggagaagatcgtggaattggaagagccttttaaacaagagcagggttcacttaaaagtcttgaaaaagccgaatcgaagctttacgaggaaatgatcaggctcaatatggatgattttgaccggatcgctgcgctctccgacaaagcgctgaagacagccggcaaacgcgagaagcacttgaattctgagaaagaaagcatagatgaagcaaagcaggagtttgaagcaaataaagcgtcggcagaaaaaatcgatgatcagaaggtcaggaaaaaggctgagaacgctgcatcttatatggaaaagcgctacaaagcatacgactctctttatggcgcctatcaaaacgcaatcggccttgacaaagagctgtacaagctgctcaaaaataaagggcttaaactggatgaccttgaggagcagctgaaaaaaatcaatcaatcgtatgacaaagtgctgaaagaaagcaagcatttcaatgagtatacaaaggactacaacaaagccagaaaagatttttacaaggctgcggggtttgagatgaaagagggctgaattgttcagccctctttttttcgacaaaatctgtatcgctattgtaatacagattgttatctatactagaacagtttgcagcagtcttgacaacgctgaaacagaaatccgataaagcgaatacatttattgaaattcaggaatgaaaacgattgacgatcatgatcgactggtgtaaacttagccttggtggaacttgttgtattagtttgtcataaactataagtgatacagttttagaacgcgttgtgctgtccttacataaaagtttcgacaaccatcaaagcggctaataagaaataaatatgagttgcgcccgtcaatttaggacaccctaattctgtatgtataagggatacacgtctatgactgtcaaaagaaaggaagaggtgactttatatggctgcaaaaacgaaaaaagcaatcgttgatagcaaaaagcaattcgatgccattaaaaagcagttcgaaacgtttcaaattttgaatgaagaaggcgaagtcgttaatgaagcggcaatgccggatctatctgatgatcaattaaaagaattaatgcgccgcatggtgtatacacgcattttggatcagcgttctatttctttgaacagacaaggccgccttggcttctacgcgccgactgccggtcaggaagcttctcaaattgctacgcatttcgcgcttgaaaaagaagacttcgttcttccgggctaccgtgatgttccgcagctgatctggcacggacttccgctttatcaagcattcttgttctctcgcggacacttccgcggcaaccaaatgcctgacgatgtcaatgcgctttcaccgcaaattattattggtgcgcaatacatccaaacggctggcgttgcactcggcttgaaaaaacgcggcaaacaggctgtggcgatcacctatactggagacggcggtgcttcccaaggtgacttctacgaaggaatcaactttgccggtgcgtataaagctccagctattttcgttgttcaaaacaaccgctatgcgatttcaacacctgttgaaaagcaatcagcagctcaaacaatcgcccaaaaagctgcggctgcaggtatcgtcggcgttcaagtagacggaatggatgcccttgctgtatacgctgcgacacgcgaagcacgcgagcgcgctgtaaacggcgaaggccctaccctgatcgaaacgctttgcttccgttacggtcctcatactatggccggtgacgatccgacaaaataccgtacaaaagaaatcgagaatgagtgggagcagaaagatccgcttgtccgtttccgcaagttcttggaaaacaaaggcctttggtctgaagaagaagaaaacaaggtaattgaagaagcgaaagaagaaatcaagcaggcgatcaaaaaagctgacgaagagccgaagcaaaaagtgaccgacctgatcgacattatgtatgaagagcttccttacaaccttgtagaacaaaaggaaatttataaagagaaggagtcgaagtaagccatggcgcaaatgacaatgattcaagcaatcactgatgcgttacgcacagaactgaaaaatgacgaaaatgtcttagttttcggagaagacgtcggtgttaacggcggcgtgttccgtgcgactgaaggattgcaaaaagagtttggtgaggatcgcgtatttgacactcctcttgctgaatctggtatcggcggccttgcactcggcttaggcttacaaggcttccgtcctgtaatggaaattcaatttttcggctttgtgtatgaagtgatggactctgtttccggacaaatggcacggatgcgctaccgttccggcggccgctggaattctccggtgacaatccgttctccgttcggcggcggtgttcatacgcctgaacttcacgcggacagcttggaaggactcgttgcacagcagcctggacttaaagtcgttattccttcaactccgtacgatgctaaaggacttttaatctctgcgatccgcgataacgatccggttgtcttccttgagcacatgaaactttaccgttcattccgccaggaagttcctgaagaggaatacacaattgaaatcggcaaagccgatgtgaaacgcgaaggaaaagacctttccatcatcacatacggagcgatggttcacgagtcattaaaagcggcggaagagcttgaaaaagaaggcgtatctgctgaggttgtcgaccttcgcacagtcagcccgcttgacattgacacgatcatcgcgtctgtagaaaaaacaggccgcgcaatcgtcgttcaagaggcgcaaaaacaggctggagtagctgcaaacgttgttgccgaaatcaacgaccgcgcgattttgagcctcgaagctccagtgcttcgcgtcactgctcctgatactgtattcgcattctctcaagctgaaagcgtatggcttccaaaccataaagacgtgcttgaaactgcgaaaaaagtattggaattttaattagatctgaacaattcaaaagggaaaagctgatatcagcctttttcccttcatgcatttccacagtcagtcggagaaactgtagccgtgtactgacagtcggcctaaacaagaggccgaccactatatcaactacgtaataatcttaggaggtcgagaactgtggcatttgaatttaaacttccggatatcggggaaggaatccacgaaggcgaaatcgtgaaatggttcgtcaagccaaacgacgaggtaaacgaagatgacgttttggcagaggtacaaaacgataaagcagttgtagaaattccttcacctgttaaaggaaaagtattagaattaaaagttgaagagggaacagtcgcaaccgttgggcagacgatcatcacatttgatgcaccaggttacgaagatcttcaattcaaaggcgacgaatcaggcgaagcgaaagcggaagaagctgaaaaacaagaaactgatgcacctgcagaagcagcggaagcaaacgagcaagcggatgcagatccgaataagcgcgtcattgcaatgccatctgttcgcaagtatgcccgcgaaaaaggcgttgatatcgtgaatgtttcaggttccggcaaaaacggccgcgttctgaaagaagatatcgacagcttcttaaacggaggaactgccggagacgctaaggctgctcaagctgaagagaaagcagaacctgctgcacagcaacctgcagctgcggttcaagtgcctgaaggcgaattccctgaaactcgcgagaaaatgagcggaatccgcaaagccattgcaaaagctatggtcaactcaaaacataccgctccacacgttacattaatggacgaagtcgatgtgacaaaccttgtcgctcaccgcaagcagtttaaacaagttgcggctgatcaaggaattaagctgacttacctgccttacgtggtaaaagctttgacatcagctctgaaaaaatatccagtcctgaatacatcaattgacgacaatacagatgaagtgattcagaagcactactacaacatcggtattgcggcagacactgaaaaaggcctgcttgtgccggttgttaaaaatgcggaccgcaaagcgatttttgagatttcaaacgaaatcaacgagcttgcgacaaaagcacgcgaaggcaaacttgctcctgctgaaatgaaaggcgcttcttgcacaattacgaatatcggctctgccggcggtcaatggttcacaccggttatcaaccatccggaagttgcgatccttggaatcggccgcatcgctgagaaagctgtcgttcgtgacggcgaaatcgtcgctgcacctgttctggctctttctctaagctttgaccaccgtatgatcgacggcgcaactgcacaaaacgcgttgaatcacatcaagcgtttgctgaacgatccacaattaattttaatggaggcgtaatgtaatggtagtaggagatttccctattgaaacagatactcttgtcattggtgcgggacctggcggctatgtagctgccatccgcgctgctcagcttggacaaaaagtaacaatcgtcgaaaaaggcaatcttggaggcgtatgtctgaatgtcggatgtatcccttcaaaagcgcttatcaatgcaggccaccgctatgagaatgcgaagcattctgaagagatggggatcactgctgaaaacgtaaaagttgactttacaaaggttcaagaatggaaagcctctgtcgttaataagcttaccggcggtgttgaaggccttctgaaaggaaacaaagtcgacatcgtaaaaggcgaagcatactttgtagacagcaattctgtacgcgtgatggatgagaactcagctcagacttacacgttcaaaaatgcgatcattgcaacaggttctcgccctatcgaattgccaaacttcaaatatagcgaccgcgtactgaattcaacaggcgcacttgcactgaaagaaattcctaagaagctcgttgtcatcggcggcggctacatcggaacagagctcggtactgcatatgcaaacttcggtactgaagttgtcattcttgaaggcggagaagaaatccttccaggatttgagaagcaaatgagctctcttgtgaaacgcaacctgaagaaaaaaggcaacgttgaaatccatacaaaagcaatggctaaaggcgtagaagaaaaagctgacggcgtaaccgttacgttcgaagtgaaaggcgaagagcaaacgatcgatgcggactacgtacttgtcactgtcggccgcgttgcaaacacggacgagctcggacttgaacaagtcggcgtcgaaatgacggaccgcggcatcatcaaaacggacaaacaatgccgtacaaacattccgaacatctatgcgatcggtgacatcatcgaaggtcctccgcttgcgcataaagcttcttatgaaggtaaaattgctgctgaagcgattgccggagaagctgcggaaatcgactatcttggaattcctgcggtcgtattctctgagcctgaacttgcatctgtaggctacactgaagcacaggctaaagaagaaggtctttcagtgactgcagccaaattcccgtttgcagcaaacggacgtgcgctgtcattaaacgaaactgacggtttccttaaacttgtaacacgcaaagaagacggcttagtcatcggtgcacaaatcgccggagcaagcgcttctgacatgatttctgagctgagcttggcaatcgaagcaggaatgactgctgaagatatcgcaatgacaatccacgctcaccctacattgggagaaatcacaatggaagctgcagaagttgccatcggcatgccgatccacgttgtaaaataaatcaaaaaccccctctgcagggggttttttatgttttctcttattcgggtgcatgacaaattgcccgggatacatgtgaagcagaaaaaaaatccccttgcacatgcacagggggcttttaatgtttcaattccttttgaagaagccttacaattttatctttatcttttatttttccttcaattttaaccagtactttcttatcattaacaagcagcaagcttggaaagactttaacctcttttttccactcgcctttatcatgtgaaatttccatacttgaaacctgttcgggaaattctttttttaaatccaaaagcgcatcataataagccacttcctgctccatatgctcgtcatcggaaaaaaagatgagcttgaggtggcggtgattggtgctttgatgctgctggtcaggcatgatgtgagataaagaacatccactcgtcaaaaaaaggaaacaaattgcggcggtgaatatcgctcgaaaccacatgacgtctcttcacctctctatataatgcaagccgattttcctgttcgattagtaaacaattcctattttatcatgataattgaaataatttttcgttgttacccatttgttacacaattgataactgccgttttatttatgagatgttgtaggttgagcgtgtttgatgggtacatcgtcggaatcagccgggaagcgttctgcttataccttaagcaggaatacatatataacatgatggcctttttttagaaaaagagcaaaaatgatttaaatgtgttatacaatttaccgttgacaatattaatgtgacataatattataggggtaacaaatttaaacgcttccattttgaaaagaaaagaggaatgaaagatgggcacgatcgtttgtcaagactgcaatgaaaccattcagcattttgaagatgagaaagtgacgatactttacggaacgtgcggacagtgcaactgccatcttaaagaggaagaatagaaaaaagcatgcggccatttacagtgccgcatgcttttatgtttttacaggattgcctgctgttctttaataacgcggatcatatggagggtgtcatcttccggtccctgaacaggcagcccagcttccaggttcttttcgatgtagttgatattatcctcggtaatgatctcgcccggaatgaagatcggtatccctggcggataaaccataacaaactcggcaatcattctgccagctgcttttttgaacggaatgatctccgtgtttgcgtaaaaagcgtcacgcggtgtcatcgcaagcgccggaatgtttggcagaagcacttcaggcttgcgtctgttttccgcagatgaagcggcctgttgagcaatctcggttaatcctttaattaacgcatctgcatcctctttccggtctcccggtgtaaaaatgcacaggatgttgtataagtcagaaagctccacttcgatttggcatgactcgcgcagccatttttccacatcatgaccggtcaggccgaggtctttcacagatatgatcaatttggtcggatcatagtcaaaagccgctttggagccgaggatttccctcccgacgcatgaaatcccgttgatattattgatgcgttcccttgtttcgttggcgagcttaatcgtttgttcgatcagttcgtgtccctctgtggctaagcgttttctggcgacatcaagcgaagcgagcaatagataggaggtcgatgtcgtcgtcagcatgcttaaaatcgattgcaccctttcctttgaaaccagaccttctttcatattgagaatcgaactttgtgtaagggatcctccgagcttatgaacgctcgtcgccgccatatccgctccggcctgcattgccgaaagaggcagatcttcatggaagtggatatgaacgccgtgcgcctcgtcaactagcaccgggacatgaaaagaatgagccagctcgacgatgctttttaagtctgcagctatgccgaaataagtcgggttgatgacgagcagtccttttgcgtcaggatgctcaagcagcgcttttttcgctgattcaggggtgatcccgtgtgaaatccccagctcatcgtcgatttccggatggatgaagatcggtacggcgcctgagaagacgatcgctgacatcaccgatttatgaacatttctcgggacgatgattttgtctccgggtccgcatacggccatgaccatcgtcatgatggcgccgctcgttccctggacggaaaagaacgtgtagtcggctccgaatgcttcagccgccagatcctgcgcctgtttgattattcctttcggcgcgtgcagatcgtcgagaggctcgatgttgattaaatctatgcttaatgcattttctccgataaactccctgaattcagggtccatcccagagccttttttgtgccccggtatatggaactggatcgggtttttgccggcgtgtttttttaatccggtatataggggtgtttcgtgctgcaacaattgttttcccaccttcatgataaacctgctatttccttaaagactattctttatcaaaaatcgttgagttattttgcgtttttgcttgatggcataaaacaaatgaattatattatgttcttgaaagaatgtaaagaacattttatcatctttcctgtaaggggcttctaggtccctatggatagtcgcaaaaaagaaaaccaatactaaagctatacaagccgtcaggctgaactgcacaaggagatgaaccaaatggaagaagggtaccaatatccgatgaatgaagactggagcacagaggaagcgatagacgtcatatcgttttttcaggcggttgagctcgcttatgaaaaaggcgtagagcgagacgtgctgatgagtgcttaccgccgctttaaagaaatagttccgggaaaagcggaggaaaaaaagctgtgcagccagtttgaagaagcgagcgactactctccgtatcaagcagtcaaaaaagcaaaggaacaaacggaagatacgaaaattaaaatgtaatgagaaaatccaaaacaaaaagggatggcaccaccggccatccctttttgattataccgatactttctgcgtcaggcggtaaaggaaggcgagcttttcaaaagccgcttcgatttcggatagaaacgcctcttcactcatatgcagcacctcgtctttagaaagctgaataccgcaaagcgcttctgctttcttcacgttgacgagccgttcaaacaggttttccagatctttttcattcatctcagactgtctcttggcatccggtttcgtatgatcggccgaccagaaaaagcgacttggaatgctgctctcaatatccggcagatgcttcttaaacagctggccgtattcctgcttgagaggggactcatagatcaatgcaaaccatacgaaaacgtgggtttcccataaaccaatttggaaatgcggcagctttttatagccgcgcttattgtttgcgaaagcaacccagctgtcgtccggcggattgactgagcggcgcgcgtgcttggcgacgtggacaaacatttcgtctcctgtcaaagcggacagaacaggcgcaaaatgatcgccgagcccttgaagtttcgggcgcactgtgtctttcagaacgctcatccgcgcatctaaaccttctattgtaaatgtacgaaaatcctcttcagtaaaacgcagactgctcattgtgttcctccttgtccaatcagtaaagatattgtatcacagtcggcttttcaaacaaaaaattacgtttcgccttgcggaatttggggaatcgttaggtaaacacacaatttttagaataacgttgcgaatgtttgagcacttcatacgatatgaataagaaattaatatatatcacgcttaggacttaaagccagaaggattccttttgaaatcaattttctctggagggggcgtagggcacatgaaaccaatagtaaaacaaggattgaaagaggaaaaagacaatcgggccgctgtttggaggcttgaggtcgattatgaacttgcaacgctttttgaagctatggaaaaaaaggatgaaacccaaatcgagttgagcaagcgcaaactggaacgactcagaaaagaatggatcagattacatggttgaaaccataataaaaacgaaccgtttgagaggttcgtttttatctgggctgcctggatatttgtcatttttcttgatttttcccggttaatatcagtatgctatgaataaatcaacaggtatacatagaaaagaggtagtgtgatgacaaactggaaggaaatcgatcgcctggcgaaaagctgggtgaaagaagctggtcagagaattaagcaatcaatgaaagaaaagatgacgattgaaacgaaatcgaatccaaatgaccttgtcacaaacattgacaaggaaacagagcgttttttcattgaaaaaattcaatcggtttttccggatcatcatattcttggcgaagaaggccaaggggacaagctcacatctttggacggcgtcgtttggatcatcgatccgatcgatggtacgatgaactttattcatcaaaaacgcaattttgcgatttcaatcggcatttttgaaaacggaaaaggcaaaatcggcttgatttatgatgtgactcacgatgagctttatcatgcttttcaaggcgaaggtgcttacatgaacaatacaaagctcggcaagatgaaagaagtgccgcttgaggaatcgattctggccatcaatgcgacatggatcaccgagaacagacggatcgatccaagcgtattatccccgcttgtcaggcgcgtcagagggacccgttcatacggttcagcggctttggaactcgcttatgtagcggcaggcagaatggatgtgtatgtgacgatgaggctcgctccttgggattacgctgccggctgcattctgcttgacgaggtcggcggaacatatacaaccattgacgggaaaccgctcaattttcttgaaaaccacagcatcgtagccggcaatccggcagctcaccgggcgattttcgacgaatatttgccgcatgaatagcaggtctttctcttcttctgatctcgccttttttgaagagctggccgaagcgagccccgggtgggtgaaggaagagcttgacggaaacagcctggaacgctatatgagtgcttatgcgatgtataacggtgaatggctcgtgtgggaagacgggggactgccggcggctctcagctttcatctcgaatgggcgccttctaatggcaagccttggctcggaacgcttcttgtccatcccgatttccgcaaaaaaggccgggcaaaagaagtgatcaaaacgatcggaaaacgcttgagagaaaaggggcataaagcgttgtttgcggcagtgccttatgagaaagacgaatggttgaacatgctggcccgttcaggatttgaacagctgaaaacggaaaaagatgaaaagggaaaacgatatttgatcatggttttgccccttcccttgtggctgcaatgagacttgtttaacaacaggtctctttttttatgattttatgaaacaatatgcagcgtcgtttgtctataaagatgaggccttaatttgatgtaaaggaattgtggaaattgatcgaactatttagtgattatgtgctccattttgaacgttattttgttttaagcagacagagcatgcttgtcattcagtggtgtgtgacaggccttgtccttttgtatgccgtgtcatttcatccgaaagtgtgcaggcggcgcctctttttttatgcaggcatcgttctcaggctgatactggttggcgccctttcgtttgaattggctcaccaaatgaaagccgctgagttttcaaacctgtacatagacgaacaagatgcgcttctgccttttatgcagtttttgctgttcggctatattttgcttgtctcttttcattatatgatgacactcgcggaaaaagggggcaaggggctgttttttgcatttgacattgcggtgatggcgatgccgcttttccaatcgctgttcagctttgccgcctatttgaaggaatttggagcggaggagcttgaagaattgccgctcgttctgttgttgattgtcggaataccgggactgatgatctgcttgttttttcagctttattggaaaagaaaccgttacgttctccttttgattttttatattgtgacgatcggcggtttcttcatcaaaaagcttggatacgaattttttccgctgaacgtatttctgacaatgatcggttttcttatgacatatcacttgctgaatgactcgagaaagcctttgttgatggtgaagcgtgttttagccgcgggcaccgccgtatttttcacgcttcacctcaatcctttttacaatttggcggatgccgcttttacaatctcacacccggaggtttcagacgtggttgatgccaattttcggcctgtttcggttaaagaagcgaagcagactgtcagctcgttttttccgacagagagctttatctatttgtcagctaccaaccaggattttcataacgtttatcatttcaaaacgaaagattacgatgcggacgttgacggctggacgggaatgatcaccaattatcacaatcaaaaaaagcctagcgggaatatcctgtccggtcaggcatatatcaagcggtcgaagcaatttctaagggaacacggccgcgaacttgacaaacaaatcaaggcaaaggtcagccgtgatgacggcgaagctactgttgaattttaccgtgaaggcgaggatcctgaattaagcacaatgtggtttacttggcggaaggagactctgatgggattccatgaggacgcgtctgtttacagcttagaaagcgtgaaccaagcccgcgtttctggtgaggatatcgagcggggagttgaagccgtctatcgtaagctgggcatacccgtctcatcttatcggctgacagatattgatttattattcccattcagcctcaactcggcatccatcaacataaagacaagtgacggaatggggatggagttccaccctgtaacaggtgcattaacggctatttcgatcaaatctgaaagcgccttgccttatcgcggacaagagcttgaaaaacgcttgctttcattatttgatcaagacatttccaatctgaaaagggtggagttagaaaaggatctgatagaatttcagaaaaaagaaagcgatgctgtgttaaatacggtctggaccatgacgaaacatgaagagggagcttatctgacggtgagaaaaaactttcaaaaagcagatgaaaaacccccctacacgtatgcagacggggaaaaagcttttcagaaagtgtctgaacgctatcaaaaagggctggtctatcataaacggacgaagcttgtaatcgtttcagacggggatcaaaagagccgttatgcgtggcttgtcatcatccagccgttcggctcaaatgaacatgacgcatacttggttgatgccgagacagatgaggtgaaacattttgatgacaaatgaagaaaaaaaagcggtgtttatcgatttgtatgagctctatcaagaaagtgaactggaagaggaaacgatgatctggatgaaagagcatgagcagttttttcaggatcaggctgaagcggcagcagccggtaatagagagctccccggcatgcaaaaaacagatgatcatcagaagctccttcatatcaagatttttgtttactcgttatatggtgctttcctgctcctatcgatttggatgacggtgtggttttttttctaaatggctcacaataataaacagacgattgaagaactgtacagggaatattatcatgacatcatgtactatttgtacaggcgaacccatcagcttgagacggcgaaagacctggcgcaggatacgtttctaaaagcttttgcgggcctggagtctttcaggggccattcctcgatcaaaacatggctgtatacgatcgcacatcatacgtttatcaactggtacagaaaagataaaaaaatccaattttccgacgtggcggcctgcggcgatatggaacagcacacatttgaaatgcctgagcgccatttggcaaacgccataatgcaggaagagctgaaacatcacattgaccggctgaaagaagattaccagactgtcctcattttaagagagtttcaagagctgtcatacgaggaaatagcggaagtgctgaattggaaactgtcaaaggtaaaaaccaatcttcaccgggcccgcctggagctgaaaaaaagcttggaaggcagggaggtttaacaatatgaaatgccatcttgtaagagatttactgcctttatacatagaaggcgattgcagccgcaaaacggaacgtttggttgccgcacacattaagacatgcgaggattgccgggaaatgtacgacatgatgagggaacctgtcaattttcatggtgacggaggattgccaaaggaagcagaagaagcggaagaacaaaagttcaggaaagcgtattatcaaaggctgattctcaaaggggcagcgctgtttggcgggggctacttgctgatgcttttgatttacttattctttttataagaactggcggcaaccagccgccggttttttgatataaaatcaaaagccccttcattcggtaggggcttctttcctattcaagcaggcctttttcgcgcattctttttttcagtgtgaaaccgcttcccataatgacgatcagaatcgcgatggcgattgcgacgccggctgcgcttttttcggcgactgcaactccgatcatcatgatgctgatcactgcagcaagtgcgaataataagaaaatccatttgatttgtttcactgtttttccatccccttagtatgaagtctactgttagtttacagaaaatcgcgctggatagaaaggggcaatgggagctgaaaatttgaaacaaattgaaataactttgtttgtcagttataatatgaaagattatctgaatttttttaggagatgaaaatgtgaaacttcgagaagatcttcgcaatatcgctattatcgcccacgttgaccatggaaaaacgacgctggtggatcagctcctccatcaggccggtacattccgtgcaaatgaaaacgtggctgagcgcgccatggattccaatgatttggaaagagagcgcggcattacgattttagcgaaaaatacggcgattaattataaagatacacgcattaatattttggatactccgggacacgcagatttcggcggggaagttgaacggatcatgaaaatggtcgacggcgttctgcttgttgtcgacgcttatgaaggctgcatgccgcaaacccgctttgtgctgaaaaaagcacttgagcaaaacttgacgccgatcgttgttgtcaataagatcgaccgcgattttgcccgtccagaagaggtcgttgacgaagtgctcgatttgtttatcgagctagatgcaaatgaagaacagcttgaattcccggttgtttacgcttctgcgatcaacggcaccgcgtcagcagatccgaagcagcaggatgaaaacatggaggctttattcgaagcgattgtcaaccatattccttgtcctgtcgataaccatgaggagcctttgcagttccaggtggctctgcttgactacaatgattatgtcggccgtatcggaatcggacgcgtgttcagaggaacgatgaaggtcggacagcaagttgctttaatgaagcttgacggttctgtcaagccgttccgcgtcacgaaaatcttcggtttccagggcttgaagagagtcgagattgaagaagcgaaagccggcgaccttgtcgctgtatcaggaatggaagacatcaatgtcggagaaaccgtctgcccgattgagcatcaagaggcgcttccggttcttcgcattgacgaaccgacgcttcaaatgacgtttgcggttaacaacagtccttttgccggtcgcgaaggaaaatatgtcacggccaggaagattgaagagcggcttgaacagcagctgcagacagatgtcagccttcgagtcgatccgacgccatctcctgacgcatggatcgtgtcaggacgcggtgagctgcatttgtcgattttaatcgaaaacatgcgccgcgaaggctttgaactgcaagtatcgaagccggaagtcatcattaaagaaatcgacggcgttcgctgtgagcctgttgaacgcgtacaaatcgatgtgcctgaagagcataccggatctgtaatggaatcaatgggtgcgcgcaaaggtgaaatgatcgacatgatcaataacggaaacgggcaagtccgcctgattttcaatgtcccttcacgcggattaatcggctactcaaccgaattcctttcccttacacgcggtttcgggattttaaatcatacgtttgacagctatcagccggttgagccggggcaagtcggcgggcgccgccaaggcgtgcttgtctcaatggataccgggaaagcttcagcctacggcattcaaggcgttgaagagcgcggcgtgatttttgtcgagccgggcacagaagtatatgaaggcatgatcgtcggcgagcacaaccgtgaaaacgaccttgtcgtcaacatcaacaaaatgaagcagcagacaaacgtgcgctcagcgacgaaagatcagacggtcagcatgaaaaaaccgcgtatcatgtcgcttgaagaatcgcttgaatacttgaacgaggatgagtactgcgaagtcacacctgaatccatcagattgagaaagaaaattctcgacaaaaacgaacgcgaaaaagcagcgaaaaagaaaaagctggcaggattgtcgtaatatttgcagaacctaaaaaaagagcaacccaactaagcaaaggggaggggaatctttttgactgatgtaagtgaacggctgtcgttttttgccgctctctataaagtggaccagaatcccgaggcgggaatgtggtggctttatgccaccatcttcgtcctgtctgcggtcgtctttaaactgggtttcgccaaacggctgccgctgttgaaaacggcgatcatttacttttttctggcattaggctgtacgtttttaacttttttcggcgtttttctgccggttggagaagggctgatcgtagctgttttaatcctttcgatttataaaatccgcctgcaccgttcgaaaaaagagcagacgggggcgaatacgtagaaaagacatagccttcttcggctatgtcttttctgtatccgcgagaaaatccgccgttaataagtcccgaaacaaagccctggcaaaaaggatctcatcagatgaataccggcttaaaaatcgtttaaatctttgttcgattttatcgtgctcccgctggtgaaggtgatggatgcttctccctttatggcttaaacggaagtagatttcttttttattatcgctgagctgtgttttgctgacgagccctttttcggtcagctttgcggtgatccttgagaccgtcgcttttgaaaattccatcttctcggaaatcgaggtgacgttgatcggttcgtggtcgccaatgcagctgatcgtatggatgtcagacatattgagtctcatttcagctccgaattcgcgctccatctttttcatttctgcggagatgcgctctttcatgacggtttcttgctgctcctgctgatgaatgagcctgatgtacaggtcaaatatttcttgtttggcgtgtgttaaatgttccatgcagaaaaccggctcctttaatcgattattctgctttgattataccattttgttacgcgtgaaacaaaatggttaaacagattgcagattaagcgtttccgcaccagcggcggattccatcggcaatcaattgctccgcgttttccagggattcgtccacagcccaggctatgtggccgtcggggcggatcagcgctgcttttacgccattccattcaggccgtccgtcaatcgctttcagttgcataagccggacatgaggcagtctggaaaattccttcggttcttttccgaatgctgctaataagaaacgtccatcgcggtgaaatgtgtaaagtcgtttgacagtaccatctgaaagggtcaggtcaatatcgggcaggcgtttaccgttcagctcatgttcaggcattttttcatctgcatcatactgcacgctgagcgctgcaatttgttctgccagatagcgattgacgtctgaaaatccgagtatgccggatagcaattcacggaggtacagcccttcacgcgtaaaatcaaacagctttgtttggatttgtgtattgacgatcagcgctttgccgacagggtgtctttcatgatggtaactgtcaagcagccagccgggacaccgtccgttgatctttgctgcgagcttccagccaaggttcatcgcatcttgaagcccgacatttaaaccttgtccacctgcgggaaaatgtatatgcgcggcatctccagctaaaaaaattctgccggaacggtaatgctccgccaacttgctggcatttccgaagcgggacatccaaaccgggctgttaattccaaagtccgtaccgcaaatgcggctgagttctttttttaattcttccagtgtgacgggctcgtgaagcaaagcttggggcatatgcggcgccgttatgaggacgcggaaaatgccgccgtctaaaggcacgatcacaacgccgccttcacggttcacgcaagtatagaaatgcgattccggcggattttcaagcgacacatcaccaagcattgcggtgatattcgcatcagttccggaaaaagcgatgcgcgcctgcttgcggatggtacttccggccccgtcggcaccgacgatataggaagcggttagtaaggacaggccgtccggaccctggacgacaagctcggcggtgtcttcatgctcgcggacagcgagaacttcatgaccgcgaaggatgcagacaccgagattcctcgcgtgttcctcaagcaccttctcagtttcgtactgggggatgaacagtgtaaaattggctcgcgtgtcaagcgcagaaaaatccaatccagtcttcagacctgcaaagtgccccgaaccgagcggcttgccaatttccttaaatcgttctccaagccccctcatttcaagtatttcgattgagcgaggatgcagtgtgagcgcttttgagaatggagaaggctcattcagccgttcgacaatacaggtccggacgccggccaaagccagctcggaagccgtcagcagaccgacggggccgccgcctgcaatcaatacatcaaaatccatgatcaatcactccttttttgttgcatatgaaacaattttaaaatactacaaatgaaaatttttatcaactatattctgttattttgttacttatgtaacaaaaagagataaaaaaagcatggagcttgtccatgcttttatgacttgatctgctctttatcttttctgtgcggatataacttaaaacggccggttttcatccggttttcggttttgattttaattctttcgctgcattcatggcacatataggtatgtatcggccggtttcggagacgtttggcaatgagtgtgtcgtcatcgattttttcgattttgtcacacaatgaacactttaccctcacttgattcacctcgcttacgatccattataccttaatcgatctgacaaataaattttctctattagaaaaaaggaaaaagcctgtaccgtcaagaaaacagtggcacaggcttttttaaagttattgctgccgatttttcatatgtttgttcgattgattattctgcttcttttcgagttgtttttggtttctctcattcagctggtcgttgttggattttgtaggatttgtttgctggttgtctgttgcgtcgttcggcacttcaggaaggacgcgcccgacaatggctgccagctcatcgagaatccctttgacaggacgtcccgcttgaatttctctgcccattgcccgcaggcggtttacagtgtcgggatccgcgacaacggcggcgtttgctccataagggtcattctgcagagcttcagcgaccgaatacttaatggattcgactttgctgcgttccaaattgtctttcacatcaattccgacgacggagagcctgcctagcacgacggcggtcgcatcattgacacccggaacgctttcggtgatctttacaaggcgccgtgagatggcttgtccgtcttcgcggttcaccggctcctgggcgctgttttttacatgaatcggtctgttgccgggaagctcatttgcttcatttcgggcattattttgaatgccgcaggctgaaagcagcataacggtttgaattaggatcaaaaaaaagattcgcacttgaggttgcctccttaaaaatgctttcattaatttttattgttgaattaaccttctatctttattcacaaaaacatatattttagcgggcgctccatcagcttttaacccaaatgaaaataaaaggctaaaaatcctgatcaggaggcggaagattgagtaaaatttatgtgctagatacgaatgtgttattgcaggatccgaattcaatcttttcttttgaagataacgaggtcgtcatcccggctgtcgtattggaggaagtcgattcaaagaaacgttacatggatgaaattgggaggaatgcaaggcgcgtatctaaattgatagatgatttgcgtttaaaaggaaagctgtatgaaaatgttcctctccctaacggaggaagcttgagaatcgagcttaaccatcgctcttttcagcagcttcaggaaatctttatcgaaaaaactagcgacaaccggattttagccgtagcgaaaaacctcagccttgaagaagaaacgaaagaaggcggcagaccggttattcttgtcagcaaagatatgctgatccgcgtcaaagccgatgccatcgggttgatgtcagaggattttttgcacgacagggttgtcgacaatgatgatatatacagcggttatacggacgtgtacattcgctcggatcagatgaattcattttttgaacatcattatttgcagcttgacgaaatcagcgaggagccgctgtgtccgaaccagtttgtcgtcatgaaggacgcgctcggcggatcatcttctgcggttggaatcgtagatcaaagcggaaaagccgttaaaaagcttgtttttgaccaggagcaggtttggggcatccgttcccgaaacgtacagcagacgatggcgttggaacttctattaagacaagatattccgcttgtcaccctgatcggaaaagccggcacaggaaaaacactgcttgcgctggcagccggattgctgcagacagaggatctggggaattttaaaaaacttgttgtcacaaggccgatcgttcctgtcggaaaagatctcggctatcttccgggtgaaaaagaagaaaaacttcgaccgtgggtccagcctatttttgataacctggaatacttgttcaatgcaaaaaaaccgggggaacttgatgatattttggcggggatgggctccattcaagtcgaagcccttacttatataaggggcagaagcattcccgaccaattcatcatcattgatgaggcccaaaatctgaccaagcatgaagtcaaaacgcttctgacacgcgtcggggaaggcagcaaaatcgtattgatgggagataccgaacagatcgatcatccttatttggatgcgatgaacaacggcctggcctatgtagtagagcgctttaaagatcaaaaaatttccggaaacgtgaagcttttaaaaggagagcgctcccggcttgcaaggcttgcagcagacctgctgtaaataaaaaaaccgggcttttaacccgggtttcaacttgcatggcacgccggccgggtcgtctgcaaaagccgaaaacccggccgggaaaagaagaggcggagttttttccccgcctccggcgcacccgttacagtgttgccgctttaaataatgtgaatttcttttactcgtttcacaggattcatcttgttagaaccgtcgggaaaataaacgtgtacaggcccgtcttcgccaagcggcttgcctttgttgctgaagcagagaatcatgccgcccgcttcttcaattggaacggaaacgtcttcaccttccgttttgaagaggcatttgacggcggagcctgacacctccgcgtttttcaaaaaaggctcaagcttgattccgaaagtgccgtcaagcaatttttccttttcatactttttctctgatttcagcgtcggcggcgatacagcaccttctctgatttgccgttcccggtcaatcacaaggtcgtcatcttcatcctgtacctctccgaaatgtgaaaagaactgctcgagatcgaattttcggtcatcaaaaatccagacgctcggatcgagcgtaatcggatactttacatttcctgtgatcgttacaatgctcatgtctctaccactccctcacaaaaaattataagcgctttctttcgaattgtcacttctcataacaaaagccctctcggggaaagataacagcaatgacgctcggatggagggaaaaaacttgaattgccggcataataaggagctcgaatattttgtcacagaagcgaaaaaagtgacggacaaaggaaaggttgcatcttacataccggctttggccgaattatcggaggacgatttatcggcggcggtctactttaccgacgggacttgtatatcagcgggggatgtggaaaaagcattcactctgcaaagcatatcaaaagtattgtcgcttgccctcgttctgatcgatcacggaccggaaaaagtgtttcattacgtaggacaagagccgactggcgatccgtttaactccatcatcaagcttgaaaccgtcaacccggggaagccgctgaatccgatgataaacgcaggagcattggtggtcacaagcatgattaaaggagagacgaacgctgataagatcgggagactgcttgattttattaaaaaacttgcaaacaaccggagcattaccgtttgcgggaaggtcgccgaatctgaatttgaaacctcgatggtcaacagggcgatgtgctattacatgaaagagcacggcatttttcaggctgaggttgaggatgttatggatgtatatacaaaacagtgcgccattgaaatgaacagcctggacctggcaaaaatcggctctgtttttgctttgaacggcaagcatcccgaaacgggagaacaaatcataccgaaggatatcgcgagaatttgcaagacatttatggtgacatgcggaatgtataatgccagcggcgaattcgcaatcaaaatcggaattcccgccaaaagcggggtttcagggggcatcatggggctatccccataccgtttcggcatcggcatcttcgggccttcgctcgatgaaaagggaaacagcattgccggaatccggcttttagagctattatctgcgaattacagcttaagcattttttaaaacgttagcggaagcttaaaaagcgagtctttgaaatacggcgaaaggacagaaatagcttgctttttttcggctgaggctttatcataaatagaagaattaggtactcgcctggggaacggagggatacttttggcgtctgagattgtagtcgaccatcgtgaaaaagcacttgctctgttaaaacgtgatgctgataaaatcttaaagctgattcaagtgcaaatggacaacttaacgatgcctcaatgtcctctttatgaagaggttttagatacacaaatgttcggactctctagagaaattgattttgctgtccgccttggattagtggatgaagaagagggtaaagaactgctttacaggctggagcgtgaattgtctgcattacatgatgcatttacaaaaaaataaaagaacacctcagcagaatctttctgtctgagtcagcttgtcgacgacgtttcgatagaaacaatctgccggcaggctttttttattatggaatgagaaagaaaacgccagttgatgaaggaatggccgctgttcacgccgaataaacgaagacgcatgatttgccgataaaaaaatagaatggcagtcttggaacagacggacttttctttctgaggagattcgaagtcttatgaaaagggtatctttcgtgctttttaagaaagtgtagtaaaataacgaaggaactaccacaaacacattttgaaggcaagtaaggaagaggataatatgataaaaagaatgctcaaatcctatgattattcattaatcttcgctgtattcctgctgtgcgggttcgggctcgtcatggtgtacagttcaagcatgatcacggccgtgacaaggtacggacaaaacagcagctacttttttgacaggcagctgatgtttttggcgctcggaaccgtcatatttttatgcgcggcgctttttccgtataaggcttttgccaatcaaaaattccaaaagtttttgctgctcatttccgtcgtcgctttgttcgggctgtttgttgtcggacatgtggccgggaatgcccaaagctggttcagggtttcgaattacggcatccagccgggggagtttgtcaagctgaccgtcatcttgtatctttcttccgtctacgccaaaaagcaaagctatattgacaacttgggagccggaatcgcccctcctgcgatcatcacgctcttcatttgcgccttggtcgctgctcagccggatgtgggaacggcctttatcatcgctttaatcgcattgtgcatcattttgtgctcgggattcagcggcaaaacgctgttaaagctcgtgcttttggccgggattgtccttgtgctcgtcagcccgctcatttatttcaactgggacagcattttaacagaaggacggatgaagcggtttgaaagctatcaaaacccgtttaaagatgcgggagattcgggctttcaagtcgtcaactcctacttggcgatcggttccgggggactgttcggcctgggcctcggcgagagcgtccagaagtatgggtatctgcctgaaacgcacaccgattttattatggcgatcatcgccgaggagctcggtattttcggtgtcctttttgtcgtgctgctgctttctttcatcgttttaaaagggttttatatagcgaggaaatgcgatgatccgtttggaagcctgctcgcgatcggcatatcgagcatgatcgccatccagtctttcgtgaacctgggcggcatatccggcttgattcctttgacaggggtgacgcttccgtttatcagctacggagggtcatcgctcattctgctgatggcaagcgcggggatattggtgaacatcagcatgtttaatgaatattttgatcggttcaaacgaaaacagcctgtcaatactacaaaaacgaaagaaaatcaatataaaaaaagtataaatttttaaaaaactaagcgtgtacaatgaccatccgattcatttagaatagatacatacttataacagcggatgagggggaacgacatgtcacaacagtctattcaaaaagttcttgttgcaaacagaggggaaatcgctatccgcgtatttcgggcctgcacagaactgaatatccgtacggtagcgatctattctaaagaagacagcggatcttaccacagatacaaagccgatgaagcatacctggtcggcgaagggaaaaagccgattgacgcttatcttgatattgaaggcatcatcgagattgcaaaacgcaaccatgtggatgccatccatccaggctacggcttcctgtcggaaaacattcagtttgctaagcggtgtgaagaggaaggcatcatctttatcggaccgacctccgagcacctcgatatgtttggagacaaagtaaaagcccgcgaacaagctgaaaaagctggaattcgggtcataccggggagcgacggaccagtggcggatatagcggaagtgaaacaatttgcggaaaagttcggatatccgtttatcattaaagcgtcgcttggcggcggcgggcgcggcatgcggatcgtcagggacgaatcggagctggaggagtcctataatagggcgaaatcagaggcgaaagcggcctttggcaatgatgaagtttatgtcgaaaagctgattgaaaagccgaagcacattgaagttcaagtcatcggagataaagaagggaacgtggttcacctttacgaccgcgactgctctgtgcaaaggcgtcatcaaaaggtcatcgaagtggcgccgagcgtttcgctttctgaatccctccgggaaaagatttgcgatgctgccgttaagcttgcgaagaatgttgactatgtcaatgccggtacagtcgaatttttagttgcgaacgatgagtttttctttattgaagtgaacccgcgtgttcaggtggagcataccattacggaaatggtaacgggcgtcgatatcgttcagacgcaaatcctgatcgctgccggtctcagtctggacagcagcgaaatcagcattccgaaccaggatgcgatcacgctgcacggatatgcgatccagtcaagggttacgactgaagatccgtcaaacaatttcatgcctgacacaggcaaaatcatggcatatcgctcaggcggcggtttcggggtgaggcttgataccggaaacagttttcagggcgctgtcattacgccttattacgattcgctgcttgttaagctttcaacttgggcgctgacgtttgaacaggcggcagccaaaatggtccgcaaccttcaggaattcaggatcaggggaatcaaaacgaacattcctttccttgaaaatgtggcgaaacacgaaaagtttcttacagggcaatacgacacgtcttttatcgatacaacgccagaactttttgtctttcctaagcagagagaccgcggaacgaaaatgctgacatatattgggaacgtaacggtcaacggcttcccgggcatcgataaaaagaagaagcccgagtttgataagccgcagatcgtcaaaacagatgtcgatcagccaatcgcaagcggaacaaaacagattcttgatgaacgcggagccgaagggctcgtcaaatgggtgaaagatcaagaggaagtgctcctcactgatacgacgttccgcgacgcccatcagtcattgcttgcgacaagagtcagaacgcatgagctgaaaaaaatcgccaatccgacggctgcgctctggccagagcttttcagtcttgaaatgtggggcggcgccacatttgatgtcgcttaccgtttcttgaaagaagatccgtggaaaaggctcgaggagctgcggaaggaaattccgaatacgatgtttcaaatgcttttgagatcttcgaatgccgtcgggtatacaaactaccctgacaacctgattaaaaagttcgtcagcgaatcggctgcggccggaatcgatgtattccgcatttttgacagcttgaactgggttaaagggatgacgctcgccattgatgcagtgcgcgagtcaggcaagcttgccgaagcggcgatctgctatacaggggacattctcgatccgaacagaagcaagtataatcttgaatattatacgtcaatggcaaaagagcttgaagctgcgggggcgcatattctcggcattaaggatatggccggcctgctgagacctcaagcggcatacgaactggtgtcggctttgaaagagacgatcgacattccgatccacttgcatacacacgacacgagcggcaacggtatttttatgtatgcgaaggcgatagaagcaggcgtcgacatcgtcgacgtagcggtcagctcgatggcgggtctgacatcacagccaagcgcaagctcgctttaccatgcgcttgaaggagataaacgccgtccgcagttcaatgtcgatgcggtagagtcgttgtctcaatattgggagtctgtcagaaaatattacagcgagtttgagagcggcatgattgcgcctcataccgaaatttacaagcatgaaatgcctggcggccaatacagcaaccttcagcagcaggctaagggagtcggcctcggcgaccgctggaatgaagtgaaagaaatgtacagccgggtcaaccacctgttcggggacatcgtaaaggttacgccgtcatctaaagtcgtcggggatatggcgctttacatggtgcaaaataacctgacggaagatgatatttacgaaaggggagaatctctcgattttcctgactcggttgtcgagctttttaaagggtatatcggtcagcctcacggcggattccctgagaaattgcaaaagctgattttaaaagggcaggagccgattacagtacgccctggagaactgcttgaaccggtttcatttgacgctataaaagcggaattcttggaaaagcatggtatggagctttccgaccaggatgctgttgcatatgcgctttatccgaaagtgtttaccgagtatgtcaagacagcggaactgtacggggatatctctgtgcttgatacaccaaccttcctctacggcatgaccctcggcgaagaaatcgaggtcgagattgaaagagggaaaacgctgatcgtcaaacttgtctctatcggggaaccgcgtccggatgcgacgagagtcgtttattttgaactgaacggccagcctcgcgaagtggtcattaaagacgaaagcattaaatcgtccgttcatcaaaaggtgaaagccgaccgttcaaacccgaatcatatcgcggcatctatgccgggaacggtaatcaagcttcttgtaagcaaaggggaccaagtgaagaagggcgatcatttgatgatcaatgaagcgatgaaaatggaaacgaccgttcaggctccgttttcaggaactgttgaaaacattcacgttacaaacggagaagccattcaaaccggcgaccttctcattgaactgaaaaaataaaagcacggccgctgacttttgtcggcggcctctttttatgaaaaaatcccccccaaaaggcggaggatcaaccgtttatttttatttttgcacctgcctgcgatagcgcgcaacaagcagcaggaagtagcaaaggattccgaacaggcaggaaataaagaatgcgtgggcgagtgcaaaacccaaatccagtctgctgtagacaaccgcaattcctgaggcagcctgaaggatgatcaggatcagggaaatcatccagccccaataaatgcgtttttgatttttatactgtcttgctgcatgtaccgctgccgcgatgatccaggcgaacagaagaagcgccgcagctctgtgtcccatctgcacccattcgtgaaacttcccgggaagccagccgttttccgtgctgcacatcggaaagtcaaggcacgcgaggctggaactcgtatgccggacatatgcgcctgtataaacgacgacatatgtgtatataatgattcctatcatatgaaactgcatggtttttcctatataaaacgattcggatttctgtttgctgtcagcttcaaacaccaggagcgtcaaaagcagcacagaagcaaaggaaataagcgagattccgaagtgcaaagccatgatcagggccgatgacccgaagacgaccgctgcagcgcccaaaagcgcctgaagaatgagaaagacgaccgacatcaccgcgagaaatttcgtttctctgatatggccgatttttttccatgtccaaatggcgagagccagcacaaggacgccggatgtgccgctgacaaacctgtggctccattcgataatcgattcaagggttaaagccgggaatatgcttccgttgcaaagcggccaagatctgccgcagcccattcctgaacccgtctttgtgacgagggcgccgccgatcagcacgaaaagcatggcgatagttgtgataattcccaagccttttaatgctttattcataaattcaattctcctttttaatgcaaactgactaataaaaagatatttaccaccttcaagtgtaagcgaattgatgttctgctgcaattcataatgattattgttcacaaaaatgcaatagaaggcgttcacatttttattggttttgaagacttgataattgtggcttcgtttgatagaactatattagaatgacagtggttttccgctcttgttcacaacttttccttcatctgtaaagaaagtcataaaaagttcacaaatataaaccggtttgtcgattaatatttaataggctgtttttttccatccggtaatcttgtatgatagagttgtaggttttttatgaatataccgcttctcttgacgtgatgaaggtttgagtaaggggggttagtattatggctgaaacaagaattacagctgatacagcaatgaatggacaaatagaagagacgacagcatggaaagatttcctcgcccttatcaaagtcgggattgtttactcgaacctgataacaacttttacgggcatgtggctcgctttttacttttcaaatctgagctttctaggaaaccttgatatcgtgctgttcactttagcggggtcctcgcttattattgcaggctcatgcgtcatcaacaacttttatgaccgtgatattgaccagctcatgcagcggacgagaacaaggccgacggtgactggaaaaatccagccttcacaggcattgtggttcggcattctgctgactgcgctcggttttatcatgctgctgatgaccaatctgacagctgccgcagtaggatttgtcggcgtctttacgtacgtgtttctatacacgatgtggtcaaagcgccgctataccgttaatacgatcatcggaagtgtgtcaggggctgttccacctttgatcggatggaccgctgtccaaggttccatcggagtcgaggcgtgggtgctgtttttaattatgtttatttggcagattccccactttctggcgcttgcgattaagaaaacggaggaatacagagccgcaaatataccgatgctgcctgttgtacacggttttgaagtgacgaaaaggcagatcatcatttggattgcctgcttaatgccgctgccgtttttcctgggcggactcggactgccgatcgtcattttggggacggtgcttaatatcggctggctcgtttgcggtctggtcggttacagaagcaaaaatatcatgaagtgggcaacgctcatgtttgtatattcattaaattacttgaccattttcttcgttgccatggtcgtatttacactttttaaaattggatagaactctataattcatcacattgaaggctgtcaattaacacttcaagcagacaacaatcatgtaaaagccgccttatcgattttttcgattatgtttaacaaggcggctttacgttcatacatagatggtattttgagtaaaaaacctcattatttatgaaatgaggaaatgtaagtgctttaattggagtggggagtcagatgaatgaataggtgtcctataaacgtttgaacagtgaaagtttcaaaaggattgattgaaaaggggttgggaagaaatgttaaagaaatggcgtctgatgtcgctgttcactattttggcgcttgttttagcagggtgcggagaaccgtttatatcaacgctgcagccggcgggcgaggtggctgatcagcagtatttcctaatgattctcagcacgctgatcatggttgttgttgtagtagtggtaagtttcattttcgtatttgtcatcgtcaagtacagaagatctaagctcggtgatgaccacatcccgaaacaggttgaaggaaaccgcaatttagaaattttatggactgttattccgattatcctccttcttatcctggttgttcctgttgtcgcacagacctttgatcttgctgatacgaaaccgatggataagaaaaacagggatccggagaagacgctcgtcgtcaacgtgcgggcgaacctttactggtgggaattcgaatatcctgactacggcgtgattacgagccaggagctggtcgtgccgaccgatgaacgcatttacttcaagctgaaagcttccgatgtcaaacattcattctggattccttctgtcgggggcaaggttgatacgaacacagacaatgaaaacaagttctacttaacgattgattcaaaacgggcggaaaaagccggagactatttctacgggaaatgcgccgagctctgcggaccttcccacgctttaatggactttaaagttaaagcggtttcgaaggatgagttcaagaaatggatgagcgatatggaaaacaataaagcggaagcgaaaaccgatctcgctgttgaaggagaaaaggtgttcaaagagaaaaactgcctgagctgtcatgcgaccgattcaaaagaccaaagggcggaagcggccagaacggctccgaacctcgcgacttttggagacaggtcgacgatcgccggcgtgaaggaattcaacgatgaaaacttgaaagcgtggctcaaggatcctgaaagcataaaaccgggcaacaaaatgaccggcacataccctgatttgagcgacaaggaacttgatgcactgactgaatatttaaaggggttaaaaaccgaagactaacgcttcaaagggagaatgagggaggttacattgtgagtacgcttaagaaaaagcaaggttttggggctgtattatgggactatttaacgactgtcgatcataaaaagattgccatcctttatttgctgggcggcgggttcttctttgtgctcggcggaatcgaagcgatgctgatcagggttcagctgatgataccgaacaatgacatcatgagcggcggggtctacaatgaaatcatgacgatgcacggcacaacgatgattttcctggcggcgatgccgctgttgttcgcattgatgaacgccgtcgttccgctgcagataggcgcgcgggatgtcgcgtttccattcttgaactcgctcggcttctggctgtttcttttcggcggcatctttctgaatttaagctggtttttgggaggggcacccgatgccggctggacgtcttatgcgtcgctttcccttcattccgaagggcacgggatcgatttctatgttctcggtctgcaaattgccgggatcggtacgctgattgccgggattaactttctcgcgacgatcatcaacatgagggcgccgggcatgacatacatgaggctgccgcttttcacatggacgacattcgtcgcttcggctttgattttgttcgcgtttccgccgctgaccgtaggcattgcgctcttgatgctggaccggttgttcggaacgagctttttcaatccggaattaggcggaaatacgatcatttgggagcatctgttctggattttcggacaccctgaagtttatattctcgtactcccggcgttcggcattttttcggaaatcattccggtttttgcgagaaaaaggctgttcggctattcttcaatggtatttgcaaccgtattgatcggctttttaggcttcatggtttgggctcaccatatgtttacaacgggactcgggcctgtggcaaacgccatttttgcggtggcgacgatggccattgccgtcccgactggtattaaaatcttcaactggctgctcacggcgtggggcgggagcatcaagtttacaacgccgatgctttacgcgatatcctttatcccgacgtttgttatgggcggggtgacaggcgtcatgcttgctgccgcaccggctgactatcagttccatgacacgtactttgtcgtggcccacttccattacgtcatcattggcggagtggtgttcgccatcctcgccggagctcattactggtggccgaaaatgttcgggaaaatgctgagcgaagcgttgggcaaaataacgtttgtactctttttcatcgggttccacctgacgttcttcatccagcattggctcggattgtggggaatgccgagacgcgtgttcacatacttgccgaatcagggatttgacatggcgaacctgatcagttcaatcggagctgtgtttatggcggctgcggtcatcatactcgtgatcaatattatcgtgacgactgccaaaggggaaaaagtcggcagcgatccttggcaagacggaagaacgcttgagtgggccgtttcttcgccgcctcctgaatacaacttcaaacagctgcctttggtcagaggccttgatgctttatggatcgaaaaaagagccggcaagcagtcaatgaccgccgcggagccgcttcaggacatccatatgccaaacggatcgattcttccgttcatcatgtcactcgggctgtttatatccgccttcggctttatgtaccggacggaatttgcctgggggctgcctgtcattctgatcgggttagggatcacgttatttatgatgcttctccggtctgtaattgatgaccacgggtaccatattcataaagaagatctgatggatgatgacgacaaaggggtgaaggcataatgcatacagaagagaaattgacggctgaaaccttcccggcttctcctgaaaaagctacgttagaaggaaaaaataaatttatcggcttttggctatttctcgggggagagacggttcttttcgcgtctctcttcgcaacataccttgcgctgaagaattcgaatgcaggggggccgaaaacgaccgagatgttcgacatggggctggtctttcttgcgacaatgctccttttgacgagcagtttgacgagcgtgtatgcgatgtatcatatgaaaaacttcgcttttaaaaagatgcaggtttggctcggaatcaccgttctgctcggtgcaggctttctggcgcttgaaatatatgagttcacgcattacattcacgaatatgggttcaccattcaaagctcggctctcggctccgctttttatacgcttgtcggcacacacggagcacacgttaccttcgggcttctctggattctttctttgatgatcagaaatgcgggccgcggattaagcctttacaacgcgccgaagttttttgtcgcaagcctctactggcattttatcgacgttgtctgggtgtttatctttaccgttgtatacttgatggggatggtgggataaaaatggtgaataacgaaaacagagggaatcccaaaacagatcttgcctaccgcaaaaagaaaaacgcggaggacatgagatatcaggttatttcattcggtttgatgatcggcctgaccattgtcgcttttttaacggtcgcctcagatgccggcgtatggtttacggtgccgtttattctgctgctcgccgtcattcaggttgcgtttcagctgtattactttatgcatatgagtcagcgggggcatgaagcgccgactttgttcctttattcgggcgttttggtcgcttttgttaccgtgttggcttttgtaacgctaatctggtggtaatcgaaccgacatacagaaaggaggatgctcatgttgggcagccttgaaatattcggttttcgcgccctttggagcccctatttcctaggggctgtcgttttcataaccgccctttacttttttctgatgaaacgcttaggatcagaaggagagcgggcgtccaggaaagaaatcggtttattcctgacggcgatgattcttttatacgcgtctaagggcagtccggttgatttgctgggacatattatgttcagcgcgcatatggcgcaaatggcggttctgtatttgatcgtgccgcctctgatcatccttggcataccgccttggttttggaaaaaggtcatttttctgccgatcgtcaagccgctgttccggtttttttccaaaccattgatcgcgataatcgtgtttaacggtctattttcgatgtatcacattccattggtgtttgattttataaagacggatgccgtttatcatgccgccattaccgtgctgatctttattgcagcgtttttcatgtggtggccgctcgttcacaaggtcgaggagcttccgcagatgagcggacttttgaaactcggctacattatggctgacggcattttgctgacaccggcgtgcgcgttaatcatgttcagcgatacggctctgtattcgacatattcggatccgtcagcatgggcggaggcaatgaagctgtgcgttcctctcgatacgctgagcggaatgacgcttacaggtccggaaatgttcagcagcatgcctgttctcgaagatcagcagcttggcgcgattgtcatgaaaatcctacaggaaatcgtgtacgggacatttttggcgattatctttttcggctgggcgaggaaggaaagagccaaagacgaaaaggacctggaagaagaatcatattctccgtctacggttcattaaggtcaaaaaagggtacagcctcaccgaggggctgcacccttttttatgtacgcctgctacacttcaagcgctgaaaccttttctttgatcgaattcagcaccgtcttgcttgttttgaggagctgcggcggaaaatgttcgtcttcgccgtattccactccatgcggataataatatttgcccaaaagcggcgtcatcagtttgattaccgcgcgccgggcgcccacgtcaccttcgatggcatatccgaacacgcgaaggtagaatcttccttcgaccatatcgaatttgcggtcatatgtgacgcgttcataatcccattgtccagctcttacgaacccttcgttttccatgatgtcgtctaaccggttaaggtcggcagtcaatccttcaattccggattcttcaaatttcatcccgtaaaacccccttaaaaaaattacctttactgacaatcatagtatgaaagcgttaaactttcaatcctgcctgagccgatatataaatatttttgtggacagtatgaatcgcgcgcggcttgacgacaatatgaacaaacgaacgacaagaggaggtcttctgattgacacgtgtgaaagatatcatgacaaaggaaacattatattgtacggttcttgataatgtatacgaggctgccgtgaaaatgaaagacggggatgtgggagcgattccggttgtgcttgatgacggcttggaactggttgggatcgtcactgaccgggatttagtgctgcggggaatcgcagctaaaaaaccgaattcgcaaaaaattacaaatgtcatgacgactgatctcattacggtaagtgaagacgattcaattgaaaaagcggtcgatctcatgggagattatcagatcagaagggtcccggttacacggggaaaaacgcttgccggcatcattacgctcggcgatgtttcaactcacaataaatcgaaccgccaggctggcgacgcgctgacatttatatctgaaaacgaagagcggcctggagattttcttcattaaaacatattttgtctcacatcttaataggctgtattaacattgaaaattcatgtcagttctgtttaaatgacactaaaggcaagtttttgatgcgtgcgcagcttaatggatagattgatccgtcagtcggaggtgaaagtttgaaaaatatattaagagcggtcgtgatccttctcatcgttgcggcttcatacacgctgtttattcaatacggctcaacgcctgagaaaattgcgaaggaagacaagccgcaagtctcaaacgaagatgcaaaaaaagagaagcccttgaacattcccgattccggcctgctttcctttatcggggaatcggccgagacgatcgaaaagaaactggggaaaccggacagagtcgatccttcagcgtatgattatgaatggtgggtctataaccaagggaaaaaacagtacgttcaaatcggcttgctgggcggcaaggctgtgacattgtttgcgacaggcgacggggtgaacaccgctccgtttaaaatcggacggccgtcaagggaagttttcaaaacgacccagatcgccccgtatgtcaatgttcaatataaaggcagttcataccgttttgagttttccgaggaagatatgaatacaaggccgacggttaaagtcggaggcatctatgttcagctgtacatggataaattcgaggggacgctttcaagcatcagggcatttgatgcgccgactttaatcaagcaaaggccgtatgaagttgtctacagaggcaccctgatcgagcctaaagcattgacagaatcggattggaagaaaatcgagaaagcaaatgagaagcagatttttgatataacaaacgttatccgcgcaaggcacggcctgtctgagctcacttgggatgaaggcgtatcaaaagtggcttacggccacagcagcgacatgaaagagcaccattacttctcccatgtgtcagaaacggaaggcaccctcaaagacaggcttgaaaaaggaaaagtcaattttgagcaggcgggggaaaatatcgcgctcaactatgtcgacggacctgcggcggttgaaggctggttaaacagcgaagggcacagaaaagcgctcttaaatgccgactatacccatctcggcgtcggggtggatgagaaatattatacgcaaaactttattaaagaatggcaatagagcccgggacaatacccgggcttttcgttttttgagaaatcctgaaatgtcggctgctcaccgttcctgtaaaaagaggaattttaggcgaacattttttgccggggcggattacactatagtaggcatatgttttcggagggggtgtagacgttggcaaatcaaaacgcgcaatcatccatcaatgaatttaagcaatttataaaacggcatcctaagttgatttccgaagtccggaaacaagaaaaaagctggcaggaagtctatgaaaactgggttttgctcggggaagacgattcgatatgggatccgtacagggaagaagcttcagcggaaaaggagccggacgctggcggcaaaaacgatttcatttcgaaaatggtgacggccgttcgaaagatggatgccaatcaaatgaatgagcagatcaataaaatgagccagtctatttcttcgctgcaaagcttgctcagccagttttcgggcggaagccaaaaacagcagaaacaaagcggcggcgagcatccgttttctttccgaaaagattagggaaggagaaagacatgcgtaaagaagtgcaggagtatgtgttcgccgacgaagagcgccgccggttcatccgtgagcagccggtctggtaccgcaagctttcgcggaatccgaatgatctgtcagcctttcatctcgatatgatgaatttttatgaaaaaacgattcctcacagggtcaaccagttatcgggcagcattcagatggcccagatgatgctgcaaatgtttcatgcgatgcgcactcaggattaatttaagcctgagtctttttttgtgatgataaatcgcgccattctggtaaagctaggtgtgaaggagttgatctgtgatgaagaagtgctggcttgtaatctttctgtgcctcttgctggccggctgcgccacccataaaccaaagcccaaaggcttatctgattggcgcgattccgcttgtgaaagcgaagtttttggaaaattatagttcggaggcggcatagacatttttgaaaacggctgttttgtgatacactatagctggaggtgcatgtctatgtttgccacaatggaatcgttgcggcttcaaaatgaagcatatgatttggccaacatgattcttcaatcagaggcggctgaacattacagaaaatgctacaagcgtctccgcgaagatgaagaggccggacgtattatcgcttcgtttacgaaaataaaagaacagtacgaggatgtgcagcgctttggcaagtatcatcctgattataaagagatatccaagaaaatgagggaaatcaaacgggagcttgaccttcacgatacagtagccgaatttaaaaaggcggaaacagagctgcaatccattcttgatgaagtcagcgtggaaatcggtcatgctgtgtcaaaacatatcaaagtaccgactggaaacccttattttgataatctttcatcttgcggcggcggctgcgggtcaggcggaagctgcggctgtaaagtttcctgatgaggctcggtcgccccgagtctcgtttttttatagaacttcatgcacagagcgacaggcaggtgaacaatttggaaatcaggcgtcaaggcttaatcgtttggctgcactccttgaagcaggcgaaaatgctcaggaaattcggaaatgttcattacgtttcaaagcggctgaaatatgtagtggtgtattgcaatatggaagatgccgaaagaatcatcgcaaaaatacgttcgtactcttttgtcaaacaggtggatctttcatacaaaccgtttttgaaaatggagtttgaatccaagcaggataaagcgaaagaatacgactataaagccgggctctaacttggtttatgttaaaaaaatccccgcagaaatacctctgcggggtccttctattccttaaaaaattaaggagaaggcaaagggagaggagaaaccggaggaagaacttatggggaaacgtaagtcttctccgcggttggcaacaacatcaatcgatgctgttgctattattatcaccaccgagcctttttgctatacatatgaatttgcactttgggtgtttgtgccagaaaacactttatgataagataggaatgatttttttcgagttttaagaaaaagtggtggaagtatgagagtgatttctgggacgtataagggacgtgccttaaaggcggttcccggcacgtcgacaaggccgacgaccgataaagtaaaggaatccatctttaatatggtcggcccgtattttgaaggcggcaccggccttgatctgtacgcgggaagcggcggattgggcattgaagcgctgtcgcggggatttgaccgcttcatttttgtcgaccgggattttaaagcgattcaaaccgtgaaaggaaatttgaaaacgctgggcttagaaaagtgcgccgaagtgtacagaaatgacgcagaacgggctctgcatgcactggtgaaaaggggcgcaagctttgatgccgtctttttggacccgccatatcgagagcaaaagctggaagcgcttttatcgatcattgatgaagcggatatgctgactgaaagagggtttattgtggctgagcatgcgaaggaagtcatgctgccggatgcggcgggcggacttcagcttgcccggcaggaaatatacggcttaacaggcgtgaccatatacagaaagagagggaatggggatggctagcattgccgtttgtcccggaagttttgatccggtgacttttggacatttggatatcatcaggcgcggggcgaaagtgtttgataaagtttatgtatgcgttttgaacaattcttcgaagaagccgctgtttacagtggaagaacgctgtgggctgcttcgcgaagtgacgcaggatatcccgaatgtgcaagtggaatcttttcaggggcttttgattgattatgcaaagagcaagcaggcaaacgtcatcctgcgggggcttagagcggtatctgactttgaatacgagatgcagggaacctcgatgaacaaagtgctcgatgaaaatattgaaacgttttttatgatgacgaataaccaatactcgttcctcagttcaagcattgtcaaagaagtggcaaaatataaaggttcagtcgcagaactcgtgccggaagcggtcgaggctgcacttgaaaaaaagtttgcaaaaaatgagcggccgtaaccggctgctcattttttaacaggggcgtaagatttggcataaagaatgatatagatgagaagggtgccgattgttaggagcggaccgatctctgctaaagtgttccacatctccagaaagaaaggttccgtcttcccggccgtcagaaaggagaagaccggctcagtcggagaatagaacgatgtgtaaagaggcttccaaagaataagaacaaagatcgctgcataaattccctggaggatgcgagcgataaaaaacggcttaaagcggatatccgtttcagcaagaatgcctgcaacctgcgcttggacgcagaagccgctgaaacccaaaataaagctgacgatcaccgcttgctggagaagcgccgcatccgttgcgctgaccagtttgctgccgagcgtaatctcaaacaatcccgataataaaggcttatcaaaatcaccgggcaattgaagagccgtcaaaatcattcttgtcgcgtgcgaaagaatgtcggtgatgtgcatcacagaaagaatgttattaaaaaccgaaaaaagaatgatgaagccgcccaccattagcagcgtttgaacggaggagatgacagcatcgctcaaaagtttgccgagcggccgcttttcttcaagtcttgcctgatggagcgcttttaaggcttctttaattgaaggcacaggaagcttctttcgcacggcggtgcggttttcttcttttcttccgtaagtgcgcatcgtcagtccaactgcgaaattgcccaaataatgggccgccgcaagcacaacgccaagagaaggattatggaaaaagccgaccgcaacggctccgaaaataaacagcgggttagatgagttggtgaatgaagcgagccgctctgcttcgacccgggaaatctgccgttcctgtctcagccttgaagtcagttttgcgccggccgggtttcccgatgccattcccattgcgagcacgaaccctccgacgccgggtacgcggaacaccggtctcatgaaaggctcgagcaacagcccgacaaacctgacgacaccaaacccgatcaagagctctgataaaataaaaaaaggcaaaagggaagggaatacgacctcccaccacatggcaagtccacttttagaagcgtcaaatgattcttgcgggtgggtaatgacggcagctgtaaatgaaagcagcaaaacggcaatcatgagtgtctttacctttgacatgtccatttctaaccccctttgcggctgtgaatacacattggaaacaggatcatgataaaataaacgaaaagcttgcccgatttgtgcggtagccttctccgtgaaacttctttatcattatacgaaggctggtccttattttagaccaccagattgcagatcggcgatgaaacaaatgaaccggaagctctttaaatgcgcggaaacccttctccttgatgagcatcaaaagaagggcatttcatacatctgtgaattcatgcaggctgaaaattcgaagccggatcaagatgtgagccggtgaaaataaagatggagggttacattttcatgctgaaaaaaagaattatacgcatcgcactattgctcgttatcatcgtggccgcgctgtcatttgtgaagctgccatattacatcaccgaacctggcgaagcgaccgagctgaaccctttaattaaagtcgataacggctatcctgaaaaagggagcttttctttaatgacagttaaagtcggtcctgccaacccgcttacatatatatgggcaaaaatgcgcccttaccacgaaattcttccggaagaaaattttaaacaagaaggcgaatctgatcaggaatatatgaagcgccaactgcaaatgatgagagattcccaggaaaatgcgatgatcgccgcttataagcgggccggaaaagaagtcagctacacgtttaacggcgtatatgccatgtcggtcgtcagcggcatgcctgcagaagggaaaatacaagtcggggacaaaattaaaaaagcggacggaaaatcgttccggtcagcggagagcttcgtccgctacatcgagtcaaaaaaagccggggaccgcgtgaaaatcgtagttgaacgggataaagaagaaaaaacatatgagatgaagctgaaaacattcaaagaagatccaaagagagcggggctcggcgtctccctcatcacagaccgcaatgtcaaggtgaagccggaggtcgatatggatattgaaaacatcggcggcccttcggcagggctgatgatgtcaatggagatctataaccagctgacaaaagaagacgagacgaaaggacaccatattgctggaaccggaacgatcgacgacgaaggcaaagtcggtccgatcggcggcatcagccagaaagtcgttgcggcagacaaggcgggagccgacatcttttttgccccgaacgaaggcggaaaaaaaggatcaaactatgaagaagctgtaaaaacggcaaaagatattaaaaccgatatgaaaatcgtccctgtcgacacgatggatgatgcgattcattatttggaagataaagtgaaaaacacctgatgtccatcaggtgtttttatttgcgcaaaaatatccggctgtcttcgtcatacctgatcggcgaaagggaatattcccgctctgtcagcatcgtccgcaccggctctttgagcggggcgctgtatacttggcccgcttttatgtcaagctggagggaaggatgggaaaacgatcccgtctttgtaataaggggtgcgctcaagctttttttcttttcagccaaataggcctgccctttttttgtcattccgagaagtctgatatatgccggatgtgtttcgtttaacatgcgcttaacgtcggctttcttcgtttttgtgaggatatgggtgttcatgcgctgcagtcttgtccacgtatagcgcttcgttttcaaaagctccatgtattccttaaaagagcctgctttccggatcgcttttttgacgcggtgctcaaggccttcttccacttcgtatatccctttcagctcttctgtatccattgtatgcaggctgtatttcaaaaaggggaaataatcttcaggcgagtgccacatgccgaaagtccgggcgtattcatcgagctcatcgaccgttgtctttggaaggtagaagcggctgtccgcaaggcttcccgtttcaaaaatcgacttgcgtatgctcgtagcgcttgcgattcggtccgcttcagggaatgttgaatcgtgatagcctgaggaccggcgcttgacggtttcgggcttcatgcttaattgcttttgcatgatggctttcacataatggaatccgagaatgttgttcggctttgaaaggtcaacgatgttaccgccttctcttgttacagaccggaacgcttttgccatcgcttgcgggtagctcagcccaaacgctatctgctttctggcttcttcgttgagcctgtcttcgtgctctatcgtgtgtgcggctgtattgagaaatgcctcaatatcgccgtgctcgcttccgaaaaacaaagaagaacaccctaattcatttaaaatcgagacggcgccttcagcaaacgtttccgctttttggacggcgaatatgtaagggagttcaacgacgacatcggcaaaagatgcgagcgccatcttcgtacgcgcccactttgatacgatggcgggttcgccgcgctgcaaaaaggagccgctcataacggcaaccgccacctcgctccgcgtttctgattttgcttcctttatatgatataaatgtccgttatgaaaaggattgtattccacaacaaggccgaccgctttcattttttcacctctcttgcatctcttgaaatagttatgatacatttacacatggaatgtccagacgcctcgcgaaaacagcgtttttcctaagtgtatgaattgttgttcacgatgtcaacgaatgaaaggcgcaggcgcatatctgtaaagaaaaaatattgacaaaaaacatgatgaaagctataatcatgtttgttgctcacttagaggtgatacaatgaaatggacgatacatcagctgaatcaaatgccgaagaaggactttgaatttgatgaaacagttgatttaagcgaactctctcaaagctcggaaatccgcagcatttcaccggtgcgggtgaaagggcgcgcggaaatccgctcaaagcaggctgcatttgattttaccatttcaggcgagatgatcttgccttgctcaagaacgcttgttgatgttcgttatccattcagcatttctacaaaagaactgtttatatttcataagaccgaggaaatggaagatgaagacatccatattgttgaagatgacctcatcgacttgactccggtcgtgaaagaagaaatccttcttgagatccctatgcaaatcttttgtgagtctgttcaaaaagaagaaggtgctccgcaggagggcaaggattggcaggtcattacagaagatgaccggaaagaccggatcgatccgagacttgccggactcgggaagctcttaaaacaagaagatgaatcttaacgctctttaaggaggtgggaataatggctgtaccttttagaagaacttctaaaacgaaaaaaagacttcgtcgtacacactttaaattgcaagtgcctggtatggtagaatgcccaaactgcggtgagatgaaactttcacaccgcgtctgcaaagcatgtggatcatacaaaggaaaagacgtaaaaagcaactaatcgtcaacaatgaaaacacaagacttcatgtcttgtgtttttttatacccgttttcccttcatccttttatttcctgtaaagaaaatagtctatctactctatcagccgcatatgtatgaggtaaattcataaagtcatggagggggataacatttgacgattacaagacaggatgcatggacacaggatgaagatatattgctggctgaggtcgtattaaggcacattcgggaaggcgggacacagctttcagcctttgaagaagtgggcaaggctttaagcagaaccgcggccgcctgcggattccgctggaattcatttgtcagaaagcaataccaatcaggcattgaactggcaaagaagcagcgcaaagagctgcgcaaaaaaatcggtatccattccgcaaaccttcctggatctgtcaaaacggtttctgagagcaaggcggaaaacctgacgctcgatgatgtcatagagtacttggaaaagctgaaagaagccccggttcaaaaggactttatcgacgagaagaaaaagcttgctgaagaaatcaatgagctgaaacaagaagttgaaaagctgcgaagcgaaaatcaatcgctgaaaaaaaagcttgaattgacagaagaggattataaagcgctgattgaaatcatggagagagccagaaaaatggtcgttcttcagggagacgaacgaaacaaaaaggcgatgctccagccggagccgaatgaaaatctgggggaagcttgaaaatagaaaaccggccatccgctatcggccggcttttttcgtttatgctgattcagaactttgactaggttcgctcgcaggatgccaaacgagcggattttcccctttatcccgggccatatcgtatttaaccggtgtaaagcccatcttgttccaaaaatcggatgatttgacgcgcggacttgtgcgaatcgggagtccgaaagatttggcgaactccacaagcatcgttccgtagccgtttcgctgataccccggcaaaacttcaagcttccagagctcgaggtaatcttggccttcttcaaaatattggtttgatttaccatccactttatacaggctcattcttgcgacgagccgatttccgtaatagatgccgtaaaacggtgagttgctgtcgttttcaatcatgttgctttcaaggtcctccagcatggaaagctcttgaatcccgtactccctgaactttttaaattcttcaagcgttttgtagttgatcagcaaacgttcgactttgaccattatgttacccccttgtttgtggtctacttctattgtaaacgcttttttcaaaaaatccaaatgataaaaattttctaatataatgaagcgaaacggttctgaatatttgaaacaactgacaagtcaacggcgaaaatttctgctatgatatacagtatatgaaaaaatcagggtgtgagaatgtgaaaatcggagtcatcggaggaggctcggtcggcctcctttttgcatactatttttcgttcggccacgaagtgactgtgattgcgcggagaaaggaacaggcggaagcgattgaagaaaagggaatccgccttcttgaagacgggaaagagatgaccgtgaacgccaggggcgtgactgaacttgatccggactgcgaccttctttttgttgccgtaaaggagcatcagctcggagccgttctgtctgagctggagcaggcggctcctcttgacatcatgttcctgcaaaatggaatggcgcatattcccgtgcttgaaaaatggcagacgggccaccgcatctatacgggatctgtggagcacggagctgtcagggtggatgaccgcacattccggcacacgggaaaaggggccgtaaaatggagcgcgttccgaagccaatccgccgcccggctgaaaaaagagctcgcttcggtgcatgaagcgttcccttttatttggtccgaagactggtataagcccctcgccgaaaaattgattgtcaatgcgtgcatcaatccgctgacggctcttttgcgggtgaaaaacggcgcgctgcttgaggagccgatgtatggggcctatatgaagttcgtctttgaagaagcgagccggattttggaacttgaagatcgccaggcagcgtgggaccatgttctttccgtctgccgccggacgaaaagcaacacgtcctcaatgcttgccgatgtgctggcagaaagaaaaacggaagcggatgcgatcatcggctatctgctgaagcgggcaaaagagtcaggagagcccgccccgcaccttacctttttatatcgcagcatcaaggcgcttgaaaacgaatgaagctaaatcttttgaccgaatcgcgtaacgtgctatactcgtttcggatagctaactatttactggagaaaggaagttctagagatgcagcttactgaactttccatacaaagtcaaaacccttttgtacgagactatataaatggaaaaaaggagatagagccgttttttgattacggcctgagcaatgaaagttggagtgtccgtttggatgacctttcctcccggacgtatgaccgcgatgcgttagcagactatttgctcgactatcaccgcaaatttcaatcggcaaccatgaatgaaacaatcgaacgccttcgcgatccgaaaagcgtcgtcgttgtcggagggcagcaggccggccttttaacgggtcctctttacactatacataaaatcgtatcgatccttttattagcaaagcaaaaagaacaagagctgaacgttccggtcattccggtattctgggttgcgggggaagaccatgatctggaagaaatcaatcacgtctacatttctgacggcggcaaggtgaaaaagcacaagctcccgcagtcccactggaaaaaaagccaggcggcaaaaacggcgctcgatgccgagaaagctgaaaagtggctggacgggatttttgcttcatttgaagaaacggagtatacgaatgatcttctcggccatttgcgccgatgtttaaggcagtctctttctttcaccgattttttcgaatttcttgttgccgacatgtttgaacaagacggcttgatccttttgaattccggagacccgggcatcagaaaccttgaagcgcgctttttccggcagctgctggacaaaaacgatgagctgaccgactctgtcaaacggcagcaggaattgatgaaacaactgggttacacaccgattatcgaaggggccgcacaacatgcgaacattttttatgagcgcgacggcgagcggtttttaattgaaaaagaaaacagcgcgttttttataaaagagcttcatcttcagtggtctgaagcagagctttgcgatttgatctgccagaacccggaagcgttcagcaataatgtcgtaacccggccgctcatgcaggaatatcttcttccgacattggcgttcatcgccggtcccggagagatcaattattggggcgagctgaaaggcgcttttcaggtcatgggctataaaatgccgcctgtcgtaccgaggcttcaggttacattccttgaacggcacatcgaaaaaaagctggacgaacggggaatcgaactccgcgaatcgattgaaaagggagcgcgggccaaaaaagagcagtattttcaagataaggttccgagcggatttaccgattcggtcaaacaggcgaaagaaaaaatcgaaaacattcattccgcagtgcgcgccgaagccctcgaaatcgacggcagcctcggcccccttttagaaaaaaacgcgggcttcattcaagatcagctccaatttttggagaaaacagtcatcagaaggattgaagaaaaagaaaactatattttgcgtgattttgacaaaattcaaacaagcatcaaacctttagacgctccccaggagagaatttggaacatcgtgtattatttgaacaaatacggtccggatttcttggaaaaatacaaggatttgccatattcatttcaaaacatgcatcaagttgtcaaactttgaaataattttttaaaaaaccctgagtagttcagggtttttttttgttctaaaacagtgtaaaataaatttgtggagagaagtggtggatagtggtgagttgaggaacgaaagtgggggccgagatcatgtttatgggtgaataccagcatacgattgattcaaaaggccgcatgatcgttccggcgaaattcagagaaggcctcggcgagcagttcgttctgacgcgcgggcttgatcagtgcctgtttggctacccgatgtccgaatggaaactcatcgaagaaaaactgaaggcccttcctcttacgaagaaagatgcacgcgcttttacccgcttttttttctccggagccaccgaatgcgaattggacaagcagggccggatcaacattgcatcgccgctgttaaattatgcaaagcttgagaaggaatgcgtggtcatcggagtttcaaatcgaattgaattgtggagcaaagagatttgggaacaatacgtagaagagcaggaagattcatttgccgaaatagctgaaaacatgatcggatttgatatataatgaatctttgcgcatgcggcgcttctgcaatcagttcatttgaaaaaggtgggactagtaaagaaatgtttgagcatacaacagtattattaaaagaaacagttgatggtttaaatgtaaaagaagacggtacatatgtagactgcacattaggcggtgccggtcacagcgagtatttgctttcacagctgtctgaaaaaggcaaattggtcgcttttgaccaggatgaaaccgcactccgccatgcgaaggaaaaactggcggattatgaaggacaagtcgttttcataaaaagcaattttcggtatttaaaagaccgtctaaacgaaatcggcatcacgaaagtggacggtgttttatttgatttaggcgtctcatctcctcagctggatacacccgaaaggggcttcagctatcatcatgatgcacctcttgatatgcgaatggaccagtcggcgggcctttcggcaaaggaagtcgtcaatgaatggccttatgaggatctcgtgaaaatcttctttaaatacggagaagagaagttcagcaagcaaattgccaggaaaatcgaaaaagcaagagaacaatcgcctattgaaacaacaggccagcttgtcgatatcatcaaagaggcgattcccgcaccggcaagaagaagcggcgggcatccggctaaacggatcttccaggcgattcgaattgcggtaaacgatgagttgagggtatttgaagaagcgcttttgcaggcgattgaggtgctgaagccgggcggaagagtatcggtcatcacattccactcgctggaagaccggatctgcaaatcgacatttaaagacatgtcgtcgcctcctgaactgcctcacggactgcccgtgatccccaaggagtttgaaccgaaattaaaattagtcaacagaaagccgatcacagcttccgaagaggagcttgaacacaattaccgtgcgcgctcagcgaagctgcgcatcgcggaaaaagcacgagagtgagctgtacgaattaaaaggaggtcatcagtctatgagcaatttggcttataaagtagaaaaacagcaaagacagacagacagtgcagaacaatccgttatcatccggagaagagcatcgattacgctgggggaaaaggtattgattgtgcttttcgccctggctgtgctcagcgcttcactttttatgatttcaaaggcttttgccgcgtatcagaccaatattgaaattcaaaagctcgaaaagaaggttgaaacggaaagcagcagagttgatgacctcgaaaaagaagccgatatgctgaaagagccggaccgtatcatggacatcgcccggaaaaaaggccttaaattgggtgataaaaaagtgaaagacatacaggaatgatgcaaaatgccgaaaaaaaataaattcatgaacagaggagcggcaatactcagcatttgttttgccctctttttctttgtcatcgtaggacggtttgcgtttattcaagcgacgggaaaagtgaacggcgaagtgcttgcgcagaaggcgaacgaacagtatgagaaaaagcggacgatcgaagcccaccggggatcgatccttgaccggaacggaaaagtgcttgccgaagatgctacgacatataagcttgtcgcgattatgagcgaaaagatgaagcctcaatacgttaaggacaagcagctgacagctgagaagctcgcgccgatcctcggcatggatgaggggaaagtgctcgatattctaaataaaaaaggagcgtttcaggtcgaattcggatcggcgggacgggatttgacatacgcccaaaaagagaaaatcgaaaagctgaagctgccgggcatcgtgttcacccgcgatacgaagcgctactatccaaacggaatcttcgcctccaacctcatcggctattcgcagatcaacgaaaaaacgggtgaaatgcaaggcatgatgggccttgaaaaaacgctgaacgattatttgaaagaaacggacggatacatgacgtacgataccgacagaacgggctggcgcctgccgaacagcaatgaaaagattaaagcgccaaacaacggagacaacgtgtatttgacgatcgatcaaaaaatccaggcgtttttggaagacagcatgacgaccgttcaaaaagagtacaagccgaaaaagattatggcggcggttgttgatccgaaaacgggcaaagtgcttgcgatggggcaaaggccgagcttcaacccgaacgtgcgcgatgtcacgaactattacaacgaccttgtctcctacagctttgagccgggctcgacgatgaagattttcacattggcggcggccatccaagaaggcgtatataatggaggagaacaatacaagtctggatcatattcggtttctaaaaaagataagccgatcaaagaccataacggtggaaacggctggggcccgatcacttttaatgaaggtgttgaacgctcctcaaacgtcgcgtttgcgatccttgccaacgataaactcggcacggaccggttcaatcaatatttgcggaaattccatttttacgacaaaacggggattgacctgcctggggaagcgaacagcaaaatcaactttgaatatttgcgggataaagtgtcgacggcttttggacagagctctgctgtcacgccgatccagcagcttcaggccgcgacggcgatcgccaataacggaaaaatgatgaagccttatgtgatcgatcatgtcgttgattctgacaaaaacaaaacgatttatcaaaataaaccggaacaagtcggccagccgatctctgccaaaacggcaaaagaagtgcgcgagctgttgggaaaagtcgtcacatctgaaaaaggaacggggcagccgtacaagatcgaaggatttgatgtcgccggaaaaaccggtacggcgcaaattgccggagaagacggcagatatttgaccggccgcgaaaactacgtgttctccttcatgggcatggccccgaaggacgatccgcagcttctcgtttatgtggccgtgcagcagccgcaattaaaagctacggaaacaggctctgctccggtgtcaaaaattttcaatccggtgatgaaaaacagtcttcactacttaaatatcacaccgaaagagactgaaaaagaagaaaagcaggaagaaaaacagctgaaaatgcctgatttctccggcaaacgagccgaatccgccgcaaaagaggcgcaaggcagcagccttgttcccgttacgatcggcgatggcttggctgtgaaagaacagtacccgaaagcgggcgaagccgtcctgccgaaccaacgggtcttcctgaaaaccgacgggaaaatcacactcccagatatgacaggctggtcaaaacgggacgccctccgcttcggcgccatggcaggcattcatatcgaaacgagcggccagggctatgtgaagagtcaaaatgtaaaagcaggcaaagaattaaaagcaaattcagtcgtgaaagtcagattgaaaaacgaatagatcccgtcaaaggctatcggctcaaagtcgatagccttccgtttggacgcggccgccttgaatagatgaaaaatcgggccgttctatcaaaacgctccgaggcataaaatgaaacaagcctaaataaggagtgaacggtctcttgcgcgtttccaatgtaacggtcagaaaacgtttaatattcgttctgctttttggtgtgatcatctttttgattattgatacaaggctcggatacgttcagttcgttctcggggataaactgacgactttagcaaaagattcttggagccggaaccttccttttgagccggaaaggggcgaaatattggacaggaacggcgtcaagctggcaacaaaccaaagcgcgccatcggttttggttgttccgaagcaagttgaaaatccgatcaaaacgagcagactgctggccagcgttttgaatatgtcggaagaaaaagcgtataaacatgtcacgaaaaaaacgtcgattgaaaggatcaatcccgagggccggaagatttcccacgagaaagcaaaagaagtcagagatctcaatttgaaaggcgtatacatcgcagaagactcgatccgccattatccgttcggcagctatctgtcccatgtgctcggatttgcgggcattgacaaccagggtctgctcggccttgaagccttttatgacaaagagctgaagggcgaaaagggctatgtgaaattttattccgatgcaaaaggcaagagaatgcctggggaggcggatgactataccccgccgaaagacgggcttgatatgaagctgacgatcgattcaaaggtgcagacgatcatggagcgggaatttgatatcgcagaagcgaagtataatccggacggtatggtcggtgttgcgatgaatccgaaaaacggggagatattggcgatggtcagccggccggactttgatcccgcaaactaccaatcaatcgatcccaaagtctataaccggaacctgcctgtatggagcacatatgagccgggttctacttttaaaatcatcacgcttgccgcagctttggaggaaaacaaagtcaacctccaaaaagatcaattctatgataaaggttccgttgaagtggacggcgcgaggctgaagtgctggaagcgcggcggacacggcgcacaatcgtttcttgaagtcgtccaaaattcgtgcaacccgggatttgttgagcttggtcagcggctcggcaaagaaaaactgttcagctacattaaaaatttcggcttcggacaaaaaaccgggatcgatctgcaaggcgaaggaacaggcatcctattccctcttgaccgcgtcggccccgtagagcaggcgacaacagctttcgggcagggggtatcggtgacgccgatccagcaggtcgcggccgtttctgcggctgttaacggcggaacgctgtatacgccgtatattgccaaagagtggattgatcccgtgacaaaacaaacagtgaaaaaacagacgccgatcgccaaaagaaaagtgatatctgaagagacatccaaacagatccgctacgccctggagagcgttgtcgcccaggggacggggcggaacgcttttgtcgacggctaccgggtcggcggcaaaaccggtacggcgcaaaaagtaaaagacgggaaatatttgaaaaacaaccacatcgtctcatttatcggaacggctccttcagatgatccgagcattgtcgtctacgtcgccgtcgacaacccgaaaggaacgattcaattcgggggtacggttgcagcgccgatcgtcggaaacatcatgagagacagtcttccgcagctcggcgttaagaagcggaaagatcagatcgaacgcgaatatcaatggctggacaaaaagctgatcgaggtcccgaaccttatagggctttccgtgacagagcttgaaccattgctgatcaacctcaggctgaaggcttccggagaaggcgatgtcgtcgttcagcagtcccctaagccgggcgaaaaagtaaaagaaggatcgacgattcgcatttatcttgacagcgatgacggagcctctgattaattcgtttcaatataggagcggctgcctgctgatgtccggggccgttcctcctaaaaaatatatcgattttaaaggattagctggatgtatcctcttttttacgctaaaatatgaactgtatgtctgcacgaagctcgtgcggcgaatcaatatgacaacgaatgaagaatgattagacttgagaggtttgatacgatgaaattgacaaagcttcttacatatttaaaaaatgcaccttcctatgccggccaagaagaccctgatataacttcaattgagatggactccagggaagtcaagacagggagtctttttgtttgtataaaaggctatacagtcgacgggcatgactacgcccgccaagccgctgaaaaaggggccgccgccattgtggcggaaagggaagtggacgccgatgtgccggtgattatcgtccgtcatacgaagagagcgcttgccgtgctgtcggacgctttttacggccagccgacaaagcagctgaggctgatcggaattacaggcacgaacggcaagacatcgacttctcacatggtggaggagatctttagaaaagccgggagccgtacaggactgatcggcacgatgtacacgaaaatccacgacgaaacgttcgaggcgaaaaatacgacgccggaaagcgtcacacttcaaaaaacgtttagaaaaatggttgatcagggtgtggatacagccgtcatggaagtatcttcacacgctctccacatgggccgggtgcacgggtgtgattacgatatcgccgcatttacaaacctgacccaggaccacctcgactaccacgagacaatggaagaatataaacatgcgaaaagtctgcttttctcgcagctcggcggatcctttaaccacgaaacaccgaagtgggccgtgctgaatgcggatgaccctgcttcagcctatttcgcccaagtgacgtcagcacatcttttgacatacggaattcaaaacgatgccgatgtcatggctgaaaatatcaaaatggctccgaaagggacaacctttgacctggtgacgccaaaaggttctgcacaagtgacgattccgcttgtcggcctgtttaacgtctacaatgttttaacggctgccgcgatcgcgattgcagcggatatcccgtttgccacgattacagaaggaattgaagggctgaaaggggtcagaggaagatttgagcttgtggacgcaggccaggacttcccggtgatcgtcgattatgcccatacccctgacagcctcgaaaatgtcttgaatacgtgcagaggcttaacggaaggaaagctgtttgtcgtcgtcggctgcggtggagaccgcgataagacgaagcgtccgaaaatggcgaagatcgccgttgaccttgctgatgaacccgtctttacagccgataacccgagaagcgaaaacccgctcgccattttaaacgatatggaggaaggcgtaaaaggagcttactatcacagcatcgtcaaccgcgagcaagcgatcttttttgcaattgcaaacgccaaaaaaggcgatgtcgtcctgattgcaggcaaaggccatgaaacttaccagcagatcggcggtcaaacctttgattttgatgacgctgaggtggccaaaagagccattcttgagctgaaataatcgaaaaagaactacaggaaagagttgttgaaatgatggatgaaataaatcaacatatgaaaaaaaacagtgaatatgataaatgcgtatgctgcttcttatatcatgcggaaaggagagaagaacgatgctcgaacaagtaattttatttaccattatcatgggctttttaatcagcgttcttttatctccgattttcattccgtttttaagaaggctgaaattcgggcagagcatccgtgaggaaggtccgaaatctcatcagaaaaaatcgggaacgccgacgatgggcggcgtcatgatcatattgtcgattatcgcgacgaccattgttatgacgatgaaattttccgaagtcagcatgaacatgatcctcctcttgtttgttacggttggatacggtctgctcggctttctggatgattatattaaagtcgtgatgaagcgcaaccttggactcacatccaaacaaaaactgatcggtcagatcgtgattgctctcgtattctatgccgtctaccacttccaagggctgccgactgacatccgcattccgggaacagagctgtcgtttgacttcggctggatttatccagtgctcgtcatctttatgcttgtcggcggttcaaatgccgtcaacctgactgacgggcttgacggtctgttgtcgggtacagctgccatcgcgttcggtgcgtttgcgattttggcgtggaaccagtcgcaatacgatgtcgcaattttcgcggttgccgttgtcggagcggtgttaggatttcttgtgtttaacgcgcaccccgcgaaagtctttatgggagatacagggtcgcttgccctcggcggcgcgattgtgacgatcgcgattttaacgaaactggaaatcctgcttgttatcatcggcggtgtattcgtcattgaaacgctgtccgtcattttgcaggtcatttcatttaaaacgaccggcaaacgaattttcaaaatgagccctcttcaccatcactacgagcttgtcggatggtctgagtggagagttgtcgtcactttttggacagcggggcttctgcttgccgtcttaggaatttacatcgaggtgtggttataagtggatactcaagatttattgcaaaatcaaaatgtgctcgtactggggctggcgaaaagcggatatgctgccgcttcgatccttcatgagaaaggcgtaaaggttgtcgtgaatgaccagctgccttttgaggaaaatgaacctgcgcggattctcgcggaaaaaggggtggaagtcgtctgcggctctcatccgacggaactgtttgatcttcattcgatcgacattctgattaaaaatccgggcatccgctatgaaaacgtgatggtcgaagaagcgctgaagcggggtatcccggtctggacggaggttgaactcgcctatcatctgacagatgctccgttcatcggcattaccggttcaaacggaaagacgacaacgacaacgcttgtttatgaaatgctgaaggccgattcgaaaaaagcgctcgttgctgggaatatcggtacggcggcaagcgaagtggccaatcaggccagcggagacgaatggatcgtgacagagctgtcgagttttcagctcatggggacttatcaattcagaccgaagattggattattattaaacgtatttgatgcccatctcgattatcaccattcgcgcaaaaattatgagcttgccaaacagcaggtttatcgaaatcaatcggaaacagacgttgccgttgtcaatttggacgatgagacagtcgtccggctcgcggagtgttcaaaagcggagaaggtgtatttttcggtccgccggacacttgagcgcggagcgtgcgtgaaagacggcgcaatcatgtttaacggcgaaccggtcatgccgctggaagacgtcgttttgccgggagagcacaatttggagaacattttggccgccctttgcatcgttaaaacagcaggcgtttccgacgcggccgtccgtaaggtgctgacgagctttacaggtgttaagcacaggatgcaatacgtcgcgacgatcaaaaacagactgttttacaatgacagcaaagcgacaaacattcttgcgacgaaaaaagcgctgtccgcctttcaaaagccggtcattttgctggcaggggggcttgaccgcggaaatgaatttgatgaactaaagccgcatatgtcttttgtaaaagcggtgatcactttcggcgagaccgcgccgaagtttgagaagctggccgaagaaatgggaatacaacaggttaaacgtgtcgataatgttgaacaagcagcaactgcggcgttcagcctgtcagacgaaggagatgtcattcttctgtccccggcctgcgcaagctgggatcagtacaaaacatttgaagaacgtggtgacatgtttgtaaacgccgtgcatatgcttaaataagggcttgtctcgtaaagatagccctaagaattagagcttggggtgttcggctttgcaaacaaaaaaaacgtcaccggattttttgctggttatcattacgctattgcttttaacaatcggactgattatggtatacagcgccagtgcagtatgggcgacttacaaatacgacgactcctttttctttgcgaaacggcagcttttgtttgccggcatcggggtcatcgccatgtttttcatcatgaacgtcgactactggacgtggaggacttatgcgaaaatactgatcattgtatgtttctttctgctcatcatcgtcctggttcccgggatcggcatggaacggaacgggtcgaggagctggatcggagtcggcgctttcagcattcagccgtccgagtttatgaaactcgcgatgatcgcatttttggccaagtttttatctgaaaagcaaaagaatattacgtcgtttagaaaaggctttgtgccggcgctgggcattgtcttttcagcttttctgatcatcatgatgcagcctgacctcggaacaggaaccgtgatggtcggcacatgcatcattatgatctttgtcgcgggggcgagaatttcgcacttcgtttttctcggcctgatcggactgagcggttttgtcggccttgtgctgtcggcgccgtaccggatcaaaaggatcacttcatacttgaacccttgggaggaccctttaggaagcggctttcaaatcattcagtctctttatgcggtggggcccggcgggctgttcggcctcggcctcggccagagcaggcaaaagttcttctatctgcctgagccgcagacagattttatttttgcgattttatcagaggagctcggctttatcggcggatcgctgattcttttgctcttcagcgttctattatggagaggcatcagaatcgcgctcggtgcgcccgatttatacggcagttttgtcgccgtcggcgtcatttcgatgatagcgattcaggttatgatcaatatcggagtcgtgactggcttgattcctgttacaggcattacgcttccgtttttaagctatggcggttcatcactgaccttgatgctcatggcggtcggcgtgctgctgaatgtcagcaggtattctagatactagattttggcgataaccctgttgcgagatagcagggttatcggcgtgtacataaggattaagggggagaacagatgcggattgttgttagcggaggcggaacgggcggccatatttaccccgcccttgcgtttattaaagaagtgaaacggcatcacgaagatgttgagtttttatatatcggaaccgaaaaaggcctggagaaaaatatcgtcgagcgggaagggatccctttcaaagcgattgaaattacgggttttaaaagaaaactttcatttgaaaacgtcaaaaccgtcatgcgctttttaaagggtgtaaaagaatgcaaagaagaattaaaacggttcaagccggatgccgtgatcggcacgggcggctacgtgtgcggccccgtcgtatacgccgcttcaaaactggggattccgacgattatccacgaacaaaacagccttcccggactcaccaataagtttttatccaaatatgttgataaggtagcgatttgttttgatgaagcgaaaacacattttcctgcagaaaaagttgtttttacaggaaacccgagggcgtctgaagtcgtctctataaaagggggccgttccctgaccgctttgggtcttgcagagggcaaaaaaacggtccttattttcggaggcagccgcggtgccgctccgatcaatgaagcggtcattgcgatgcaaaacgaattaaaaaagcgggattaccaggttctttatgtcacaggggaagttcactatgataaagtcacagctgcgcttgaaaaagaaggcgccgctccgaatatggtcgtccagccgtttctccatcaaatgcccgagtacttaaaagcgttcgatgtcgtcgtgggccgcgcaggggcaacgacaatagcggaaatcaccgcgctcggcattccaagcgttctgattccgagtccgtatgttacggccaaccaccaggaagtaaacgcacgctcactcggggagcagaacgccgctgtcgttttaaaagaatcagagcttaatggagaccgcttaattcaggcgatcgatcatattttacaagacgaaaagacgttggaagagatgaagatccgcgcgaaatcgcttggcgtgccggacgctgcggaacgcttgtacaatgtgctgaaagaattgaaacatcatgcaaaatgataagacagaaggattgtggaggttttcgatggataaggtgatacaagaattaaaagaacttgaagtcggcaaagttctggaaaacgagccgctcagcaaccatacaacgattaaaatcggaggaccggctgacgtgctggtgattccgaaagacattcaagctgtcaaagatacgatgaaggttgtcaagaagcacggcgtcaagtggacggccatcggtagaggctcgaatcttctcgttctcgatgaagggataagaggcgtcgtcatcaagctcggccagggactcgaccatatggaaatcgacggcgagcaagtgacggtcggcggcggctactctgtcgtaaggcttgcgacaggcatcagcaaaaaagggctttccggccttgaatttgccgcaggcattcctggttcggtcggcggagcggtttacatgaatgccggcgcccacggctcagatatcagcaaagtattggtgaaagcattgatcctttttgaagacggaacgatcgaatggctgacgaatgaagagatggcgttcagctaccgcacatccatccttcaaaacaagcggccgggcatttgtcttgaagccgttctccaattggagcaaaaagaacgcgatcagatcgtcgcgcagatgcagaaaaacaaagactaccgaaaagaaacgcagcctgtgtccaacccttgtgcaggcagcatcttcagaaacccgctgcctgaacatgcgggccggctagttgaagaggctggtttgaaaggccatcagatcggcggggcaaaggtttcggagatgcacggcaatttcattgtcaacgcaggcggcgcaacagcgaaagacgtccttgatttgattgcattcattcagaaaacgattaaggaaaaatacgatatcgacatgcacactgaggtcgaaattatcggagaaaaacggtaaacggcctctctacttcagatcgccttatgatataatgtatgaaacaaacaagcaaacggcatcctagtatgtcgtttgtttcgctaaacggaagctttttagcttgcccccgtgctttcatatgtcgaaaagcgcgtcttttttcgaacaaaaataagcaaataaaagtctttttgtctgctttattaacctgaggtgagcctacgtgaaacccggtattgataaagaaaaagtagtgaatatagaagaacgtattcccaaaattaaagaacagcgaaagcaaaaggcaaaccgccggctgatcacctttattctgctctttttcacgatgatgctgatcatcatttacctgcagacgccgatcagcaaagtctcgaaggtagagatcaaaggaaacaaaaacgtttcaaaggaacagatcatttccctttcttcaatccataaaggacagacggaattttggagtctgagcaagcaaaaagccgcagaaaagatcgagcagaataaactgatcaaaaaagccgaaatttctaaacaactgcccaacaaaatcgccatctccatcgaagagtataaaagcattgcgtttttgcaaaaacataatgtgtactactccgtgcttgaaaacggcacggtgcttcctgaagaggtgacgccgactgacatcggaccaacccttaataactgggaggaagacgaaaagctcgttcaaatggcaaaacagctgaacaagctttccgattccgtgaaaaaatcgatttccgagatcaactatacgcctcaaaaatcaaacccttggctgatcaaactgtatatgaacgacggctatatcgtgacagcttcgctgaaaacgttcggacagaaaatgaacagctatccggcgatcgtaaaagagctgccgaaaggggaaaaaggcattatccatatggaagtcgcgacttattttgaacctctgaaaaaaacggatgaaagcaaaaagggagacggaaattgaagaggcacacagtcaatctttcactcgccatgcttgtcctcggcttcctgctgtctttctcctatcaattcgccagggaaaacaaagaccatgaagaaactgctgaaaattggaaagaggaatattccctgcgcgaccggctgatttcccaagaaaagcaaaataagaagctggaacaggagctttacaaaaaacagcaggaagtacagaaaacagagacggctttgaaaaaggaaaaaaaagagtactacaatattgtggaagatgttgagaggtacagaatgttcgtcggggaaatcggcgttcagggcgaagggatcaaagtgacgctgaaagacgcttcgtacatcccagagggtgagaatgtcaacaactatatcgtccatgaaagccacattttccgcctgctcaatgagctgtggatttccggggcggccgcggtgtcgatcaacggacagcgcgtgacacatcattcctacatatcgtgcaacggccctgtcatcacggttgacggcaaccagtatccggcgccgtttgttatttcggccatcggggatgcggatgtgctgatgccggcgctgaacattgcaggagggcttgtggaccagctgagccgcgatcatatttcagtcagcatcgaaaaacaagataatatcgagatggagccccttttgaagcaaggggaatgaacgttgaaaagttggtgggcggacattgaagaaaaataatcgtttcatcagtttgagcatcttgatgctcattttcggcattatgctgtccgtgcagttcaattcgctgaaggcgccgaaggtccgcgatacgcgggacatttgggacctcagggaggacttgaaggaagaacagaaaaaacagcttgatctgatcagcgaaattgacaagtatgaaaaaatgctgaacacatacagtcatcaagaagaaacctcgcggacaaaagcgttgaatgaaacgcttcaaaacttaaaaaaacaggccggcttcacagatgtcacagggaacggaatcatcatcaccatttctcagctcttctcggaagaattgacaggggaatcgattcaaaatccccctcccgaccttctgaaaaagctgattaatgaactgaatatgtatgaagcggaagaaatatccatcaacgacagaagggttgtcaacacgacggtgatccgcgatatcaacggaacaaccaaaatagacggttatcctttggacaactatccgataacggtaaaagtcatcggcaaaaacgccgataaactatatagccgaatgaatgcttcatccctgcaggatctgttcgcgggagaaaatctggatttgcaaatcaaaaggcctgaaaaacaaatcaaaatcaaagcttacgaaggttcaatgcaagttgcgccattgaaaccgctcgaaaaatcaaaaggagagaattcctaatgtggcttccggttttagggcttttgctcggaattacaatcgggttcagcacgaatttcaccattccggatgagtactcaaattatttgtccctggcgattctggcatcgctcgatacgttgatcgggggaataagggcccatttggaaagtgtatacgatgaactagtttttgtgacaggctttttcttcaatattattcttgccataagtttggcttttctgggcgttcatcttggtgtagacttgtatttagtcggtatgtttgcatttggcgtgaggctttttcaaaacatcgcggtcatcagaagaatactgctcgccaaatggacggcatcgaggagaaaaaattaaaaaaaatcggatttaaaagaggatatacataggatatcacgaatattcacagtaatcctaaaactgaaaacgaagcgtattggtttgtattgattgttacacacttgtaaaaccagattcattgtattgttgttcggcaaataatagaatagaattgactgaaatgtgaggaggtgccatagaatgaacaacaatgaactttacgtcagtctagacatcggtacgtccaatattaaagtgatcgtcggtgaaatgtcagacgattctcttaacattatcggagtcggaaatgttccctcagaggggctgaaaaaaggatcaatcgttgatatagatgaaacggttcattctataaaaaaagcgtttgaacaagcagaaagaatgataggttttccgctgacccacgcgatcgtcggggttaatgggaactacatccatattcaagatacgaacggtgttgtggctgtctcaagcgagaataaagaaatccacgttgaagacgtgcgccgggtgatggaggccgctcaagtcgtttccatcccgcctgaacagctgatcgtcgatgtgattccgagacagtttatcgttgacggaagaggcgatattacagatccgaaaaagatgctcggcgtccgccttgaagtggaaggatcgctgatcacgggctctaaaacgattttacataacctgctccgctgtgtggaaagagcgggaattgaaataacggatatttgccttcagccgctggctgccggatctgtcgctttatcaaaggacgaaaaaaacctcggagtggctttaatcgacatcgggggaggatcaacaacggttgccgtatttgaggacggccaccttcttgcgacccgtgtcataccactgggaggagaaaacatcaccaaggatatttcaatcggattgcgcacctccacggacgaagctgagcgggtgaaaaagcagtttggacatgctttctacgaagaagcgtcggaagaggaaacatttgaagtcgccgtgatcgggacggaccaaaagcagacctttactcagcgggaagtggcagacattatagaagccaggcttgaagaaatctttttattcgtggcagaggaactgcggaacatgggaataaaagaattgccgggaggctttgtgcttacagggggacaggctggaatgccgggggtcctcagcctcgcacaggatgttcttcaaaataacgtcagagtggctagcccgaattatatcggtgtaagagaacctcaatacatgacaggagtcggcctcatccaattcgcttaccgcaacgcaaaaatccaaggcagaaaagtagggtttaagatgccggaacaagcggttcaggaagtcgcggcaactcatcaaaaagaagtgcagcagcgaccgaagccaaaatccaagcagcaggctcaagctgagaaaaagccgagcaaaatgaagaaaatatttaacttcttttgggaatagagattagtcattcgacggattaggaggatttagcatgttagagtttgaaacaaatatagacggcttagcatcgattaaagtaataggagtaggtggcggcggtaacaatgccgtcaatcggatgatcgaaaatgacgttcagggagtcgagtttatcgcagtcaacacggatgctcaggctctcaacctgtcaaaagcggaaacgaaaatgcagatcggtgcgaagctgacgcgcgggctcggcgccggagccaatccggaagtcggcaaaaaagccgcagaggaaagcaaagaacaaattgaagaagcgctgaaaggtgcagatatggtgttcgtcacagccggaatgggcggcggaacaggaacgggcgcggcacctgtcatcgcacaaatcgcaaaagatctgggcgcattgactgtcggcgttgtcacaaggccgtttacctttgaaggaagaaaaagacagcttcaggctgcaggcggtatttcagcaatgaaggaagccgtcgacaccctgatcgtcattccgaatgaccgtcttcttgaaatcgtcgataaaaacacaccgatgcttgaagcgttccgtgaagcggacaacgttctccgccaaggtgttcagggcatttcagacctgatcgcaacgcctggactgatcaaccttgactttgccgatgtcaaaacgatcatgtccaacaaaggttctgcactgatgggtatcggtgtagcgacaggcgaaaaccgcgctgcggaagccgctaaaaaagctgtttccagcccgctgcttgaaacggcgattgacggcgcccaaggcgtgctgatgaacattacaggcggcaccaacttaagcctatacgaagttcaggaagcggcggacatcgttgcagctgcatctgaccaggacgtcaacatgatctttggatctgtcatcaatgaaaacttaaaagacgagatcgtcgttacggtgatcgcgactggatttatcgaacaggatcaagattcatcaaagccgcagagacctttaaaccaaggcttaaaacagcatcatcagcctgctccgaaacgggagccgaagcgcgaggagccaagcatgccgcatcgcagcccatcacagcctgccgaggatacgcttgacatcccgactttcttaagaaaccgcaataaacgctaaacgtctacaatacattggaaagctgccgacaagaagtcggcggctttttttgcgcgctggaacagcagccgatgttccttcccctccaaaagcatcaattgtcttcttgatggaagcggctccctcaaaagccttgcatctaatctctctcttttctcccgaatgtacagattttccttttttcttgtcatcaggccgaactatgaacggtgaacaagtcatatgtaaaaagaacgaatttgcaaactgacaaaggaaaaatgacagaatacgacaatatctataaaccttttctattaccattattaatagattctgtttctagacatagaaacgcaagaaacgactatatttgctattgcttaaaggaggatgtcatgtgaagaaaaagccattattccgcacgttcatgtgcgctgcactcatcggttcacttctcgctccggttgctgtgcaggctgatacaggcacggcagcgaagacaaaggaacaaagcaaaatatctagcgctctttataaacgttttgagaaagaaggtaaagtgacctttttaattaaaatgaaaagccaggcgaaccttcagcaagcggcaaccgcggctgaaaaacgggcgaaagcaagcgttatgaccgtgaaaaaagcaaaagagatcaaacgctcggcagtgctgacttccctgcgtacaaaagctgaaagaacacaaaaagatttgaaatcgtttttggaaaaagaagagaaaaaaggaacagctaagaaagtggaatctttctatattgtaaacggcatcgccgtgacggcgacaaaagatgttatggaaaaagcggcttcatttcctgaggttgaaaaggtgctgcccaatcaaaaaatcaagctgggcaataccgaaaaacctacagtagaatcgaaaacaaccgcggatcgcacccctgcttccaacattgagcaggttcatgcgccggatgtctggaaaaagcgctataaaggcaaaggagccgtcgtcgcttcaattgacaccggcgtagagtgggatcatccggcgttgaaaacaaagtacagaggctacaacccttctaaaccgaacagtccagacaatgagttcaactggtttgatgcggtaagcaataagaaaacgccatatgatgacttgggccacggcacacatgtgacaggcacgatggtcggctcagaagccggcggcaaaaaccagatcggtgtcgcgccgacggcgaaatggatcgctgtcaaggccttttcagaggacggcggagatgaaaaatcccttttggctgcaggagaatggattttggccccgaaagatgcgaaaggaaaagcgcaccctgaaaaggctcccgatgtcgtcaacaactcttgggcaggggaacgcggactcgatgaatggtatttggatattgtcaaagcttggcgggcagctgatatcttccctgcatttgcagcgggcaatgtcagcgaattcgaaccgggcggaccgggttcagttgaaaacccgtccaactatccgcaatctttcgcgattggcgcagttgacagctcaaacgcgttagccgacttttcattgcaagggccttcgccatatgacgaaatcaagcccgatatttctgcacctggcgtcagcatccgctctgcttatccgggacataagtatgctgcaatgaacgggacatcgatggcgaccccgcatgtatccggcatcgtcgccttaatgagggaagccaatccggacctcacagtcgatgaaatcgagcgcatcctgctgaaaacggcgacgcctctgactgacaaaacgtttaaaaaatccccgaacaacggctacggatacggcttggtcaacgctttaaaagcttttgacgcagcaaaaaaaactaaatgataaaaaaggacaaaacctttaagcggttttgtcctttttttatctaattttaaacaaggccttgacaaataccgacaaaataattaaccagtttttactatatttaagttacatcaaagtcagacaaggcgtccacaaggagggggggacaggaaaattcagctaatttcataaaaaagggggatgttcatttgaaaagaaagctgagaaaaaaggcgttttccaccattttaagcggtttgttaatcggctcgctgttcatgcccgccgtttcagatgccgcagcaaagcccgcacttacttccatgaaagaacaagcagccgcagggaaggggaaaatttcaaaaactcttgtcaaacagttcaaaaaagaagatcaagtcacatttttgattaaactgaaagatcaagtcgatacaccaaaagtggccaaacaggcggaaaagaacgcgaagaaaaagtcgctgagcgctgctaaaacagaatatcaaaaacgctcggctgttgtttccgctttaagagtcaaagcggatgagtcgcaaagcgatctgaaacgttatttgaaaaagcaggaaaaacaggggaacgtaaaaaaaatcagatcctattatattgtcaacggcatggccgtccatgcgacgaaagaggtcatggaacaagtagcggcttttccggaagtagaaaaagtgcttccgaacgaaaaaaggcagctgatcaaaccgactaaacagtctgtgaaaaaatcagcagccaaggatgaaaaagaaatcgaatggaatatcaatcgagtcgacgcaccaaaagcctggaaattgggatatgacggatcgggcacggttgtcgcgtcgattgatacgggcgtgcagtgggatcatccggccttgaaagaaaaataccgcggatatgacccgaagcatcccgatcagcctaaccacgaattcagttggtatgatgcggtttcaggcgcttctgaaccatttgacgatctggagcacggcacgcatgtaaccgggacgatggtcggctcagagcctgacggccaaaaccaaatcggcgtggcgccgggtgcgaagtggattgctgtgaaagctttttcagatgacggcggaacggacgaagaccttattgcagcaggtgaatggattttggcgccaaaagataaagacggcaacccgcaccctgaaatggcgtcggatgtcgtcaataactcatggtcagggggagccgggattgatgagttttacagggatatcgtaaaagcgtggcgagctgccggcatctttcctgagttctctgcggggaacgtcgatttcgccaatccgggaggacctgcttcgattgccaatccggcaaactaccctgaagcgttcgcaaccggagcgacagacatcgataatcgcttagccgatttttcacttcaaggtccttccccgtatgatgagactaagcctgaaatatcggcgcctggtgtcaacattcgctcatctgtgcctggaagcggctatcaagacggctgggacggcacttcaatggctggcccgcatgtcgcagccgccgccgctcttatcaagcaagccgattcgtcgatcactgttgatgagaccgaaaagattttgatggaaactgcaacaccgctcacagacagcaaatttaccgaatcgccgaacaacggatacggccacggactcgtgaacgtgtttgacgcagtgtccgctgtgacaggcgggttgggcagagcggaaggacaagtcggaaaagaaggcgaagacaaaagtccgccggccttaaaccatcaagagatcaccgaaatttactcaggctcggaaacgcctcttaaagctgatgtagaagacgatgtcagcatcatatcggtcaaattgagctataaaacagatgacgccgattgggagacgatcgctgccaaacaaacttccggcgactataaaaaaggaacgtacgaggcggctgtaactgtttctgaagggaaaaccctttcctacaagtggattgtcaccgatttcggaggcaacaaaacggaatccaaagtgtacgaagtcccgatttccccggctgtgacaacagggtataaacaagatttcgagaattccgccagcggctggctcacatcaggcgtgaagaattcatgggagcgcggaattcctcagtcaggcccgaacgccgcagcatcgggaaaaaacgtattcgcaacaaatctgacagggccgtatgaaagttcggctaatatgaatcttctcatgcctcctgtcagcgttccaaaaaatcaaaagctttatctcacatacaaatattggcacgatattgaagaggactttgattacggcttcgtttacgtacagcctgaaggaaaaggtgaatggatcccggctgccgagtacagcggcaagacatcagaatggaaagacggacagatcgatttgtcggaatacgggggacagacgattaaggtcatgttcaaccttcaatctgacgacagcattgaaggtgacgggctgtacatcgatgatgtagcgcttgtcaaggaagtgaagagcgccggtacgaaaaaacgattgggcgttgaaaaacagccggccaaaatgaaggataagaaaacaaagaaacgaatgattgatccgaaaaaagcaaaaccggcagaagcccttcaggaaaaaaccgaaacgaaaaaagcagctcctgcggttcttccggtgcgcgctcaggtcagcgtgctggaaacgggcaaatcgacatattccaaccaggcaacaggcgcatacagcttggctcatgcacctggaacctatacgctgaaagcggaagcgtacggatatgaatcaaacgcccaaaccgtaaaaatcgagtccgacaagacaacaacggcagactttgttttaaaagaactaaaaaaagggacgctcaccggaacgataaaaaataaaaaaacgggcgaacccgtccggcatgcaaagttgtatatcgttgaagatgcagctgtaaaaccagtccagacggatgatgacggaagctattcattaacggcctatgaaggctcgtatacggtaaaggtctctgcaaacggatattacagcagcgagttttccgttgatttaaaaggcgatgtctcgaaagatatcgatctcgatcctttcatcggctatccgggggaaataggctatgatgacggaaccggggaaaacgcctgggctttctatgaatccggcaacgggctggccgttaaaatgacgcttgaaaacgggcaggaaaaagccatgctgaaaggcggtttgtttaaattctgggatacagaattccctgatccgggcggcactgattttgcagtagaggtctatgatgcttcgggtgaaaaaggctctccgggcaaaaaaatcgccggcccgttcaagactgaagcgctccgcacaggcgaatggacgaccgttgatttaggtgacgaaggcatcatcgtcggaaaagacttttacctcgtatacgtccagaaagaggatctggccaactcacctggacttgctacagacgaagacggagaatattccggccgcaactggcagtatacggacggctcatggtcaaaagcgccatcagaccaaggcaactttatgatccgcgctttggtcgactatgaattgtcggtgcctgtgattacgtctcctaaagacggattcatcaccaaccaaaagaacgctgtcattgaagggacatcctcgccgaatacgaccgttcatctctttaacggggatgaagaagccggaacagcggaaacggcggcagacggcactttctcaaaagaaataccgttgaataaaggggaaaatgtcatcaccgcgaaatcgtcatcggcttccggaacgactgatgcttcagaaccggtccggatcgtccttgaccagaaaaagccgaagcttacaatcgacacgccggaaagcggctcaaaactcaataaagagaccgtcaccgtgaaaggaacagtatcagacgatcacttagaatctgttcatgtaaacggcaaaaaagcagctgttgacaatggcgaatattctgcaaggattatgcttgacaacggcaaaaatgaaatcaaagtaacggcatcggatgcggcaggcaacaaaacgaccaaaaaggtcacggtagatgtcaactttgaagcgccgcaaatcaccggcttgaaaccggccgaagatctcgagctcaaaacgggagaaaccgtgaaaatcgagtttgaaagcgccgctgatttggatgctgtctttgtgatcagaatgccgctgaccaatttcaaaaccgctgcccaaaacgtaacggagctgccgatcagagaagtctcaaaaggaaaatatgaaggatattggaccgctacttcaactgcaaaagcaaaaggagcggaaatcgaggtcatcgtcagagatgattacggcaatgaaacgagacaaacggcaaaaggcaagctgtatatcaatgaaaagctgaaataaaggtgaaaagacgctgtctttaatggcagcgtttttttcgttttacgatcgacaaattcagtacgaaaacttcaaaaaatgtacgatttacgcaacattaattgacagactttacctttgggcttgatttatacttaggaaaacaaacactaaggtcaccgagccgcagaaaggggaaggatgtggaaatctatttagatgcgatatggctgttaaacttttgttttgacttgctgcttttaatgatgaccgcatttattttaaagcgaagggttaaaaagcggaggctgatcctaggggcatttgtcgcgtcaagcatcgttctgtttatgtttacacctttttcaccgtacgtccttcatcctgccggcaaactgtcgttttcggttgtgatcgttcttgtggcatttggttttaagcggttccggttttttttgcagaatttgttttctttttattttgccacttttttaatgggaggagggattatcggagcgcattctttgcttgaaacggattcgatcatggaaaacggcgtctttatgacgaattggtccggttttggagaccccgtcagctggctgtttgtctgtgtgggttttgcggctgtatggctgttttcaaaaaagcgttttgaagatgctgaagcgaagaaaattcaatacgaagaacgcgtccgcctagaggcctgcattggtgaacatacgcttcatttcaccggattgattgactccggaaaccagctctacgatccaatcacaaaaacgcccgtcatgatcgtcaatattgaaaaattgaaagttgtattgggagaagaggcaagtgtgaccatcaaggaaatgagcccgcttgatgccgtcgggaaactggatgaagcactgccgtatatcgggcggatccgcctgattccgtaccgcggggtcggccatcagcatcagtttctgctctgcttaaagccggatcatgtgctcgtttgtacggaaagagaagtgattgaagcgccgaaatgcctgattggcatcagcacatcaccgctttccgctgacggcgaatttgacgccatcgtccatccgaaaatgctggccggaaacccggtcaaacacgtttcttaaacttgaagtctgttacattatcatactcctgaagacgtttatttagaagggggaggaagatgaaaaaactaaaattaaggttaacctatctatggtacaaacttttaatgaaactggggctgaaaagcgacgaaatttattatatcggcggaagcgaggcgcttcccccgccattgtcaaaagatgaagagcaggtgcttctccataagctgcctgacggtgatcaggcggcacgagcgattttgattgaacgaaatctcagactggtcgtgtacatcgcgagaaaatttgaaaatacaggaatcaatatcgaggatttaatctccatcggcacgatcgggctcatcaaagcggtgaatacgtttaatcccgagaaaaaaatcaaactggctacatatgcttccagatgcattgaaaatgaaattttgatgtatttaagaagaaacaataaaatccgttcagaggtatcattcgacgaaccgctgaacatcgattgggacggaaatgagctgcttctctcagatgtgctcggaacagaaaacgacattattacaaaagacatcgaagcaaacgttgacaagaagctgctgaaaaaagcgcttgaacagctcaatgacagagaaaaacagatcatggagctccgtttcgggcttgtcggaggggaagaaaaaacacaaaaagacgttgccgatatgctcgggatctcccagtcatatatttcccgacttgaaaaaagaattattaaaaggctccgaaaagaattcaacaagatggtttaatttttttatgaaatttgaagcattgacagtcaagggttttcggctcgatcttcttatttttggaaattaacgatgcatatttttcccacccgaggagatactgaactttgtacagcagctcctgtagggagggaaaaaagtgtcgaggaataaagttgaaatctgcggggttgatacatcaaaactgcccgtactgaagaacgaagagatgagaaagttattcaagcaaatgcaggatgaaggagacacaacagcgagagaaaagcttgttaacggcaatttgcgccttgtcttaagcgtcattcaaaggtttaacaacagaggagaatatgttgatgacttattccaagtcggctgcatcggactaatgaaatcaattgataattttgacctgagccacaatgttaagttttcaacatatgctgtaccaatgatcatcggagaaatccgcagatatttgcgcgataacaacccgatccgcgtctcacggtcactcagggatatcgcgtacaaggcgctgcaagtgagagaacggctgatcagtgagacaagcagggagccgactgctcaggagatcgctaaagagcttgaagtgtcccatgaagaaatcgtttttgcgcttgacgccattcaagatcctgtatctttgtttgagccgatttacaatgacggaggagatccgatttatgtcatggatcaaatcagcgatgagcgcaacaaggattcgcaatggatcgaagagctcgccttaaaagaaggcatgagacggctgaatgaacgggaaaaaatgatcctcagaaaacgcttcttccaaggcaagacgcaaatggaagtcgctgatgagatcggaatctcccaagcccaggtctcaaggctggaaaaagccgccattaaacaaatgaataagaacattcactaagccgcagtcaatctgcggcttttcacatgctaaaaatggaaaatctctcattcactttattaaatatataagctataataaaagaattatattttaatttatcagaatatttacataaaaaaagggggattttaagtggttctgcagcttgagcatgcttcactaaaacgaaacggagagtggatattaaaggatattgattggacggtggaaaagggggagcactgggcgttatacggattgaacggagccggcaaaaccgcactgctcaatatgctgtgcgcttattattttccgacaacaggaaaagtcaccgtgttagggcgcgaattcggaaaaacggagcttggcgagaagcttcggcgaaaaatcggccttgtttcagccgccctgcagcagaagctttatcctgaagacagtgcatttgaaattgttttaagcggcgccttcgcttcgatcggcctttatgaatcgccttcacagtctgtcagagagaaagcggtcgccctcttggaggaattcggctccatccgctatgcggacaggagatatgaaacgctctcccagggagaaaagcaaaaggtgctgatcgcaagggccttgatggccgatcctgagctgctgattctcgacgaacctgtcaccggtctagattttatcgcgagggagcaggtgctggagacggttgaacaaattgccaagaaagacagtgcgccgtccatgctttacgttactcaccatgcagaagaaattctccccgctttcagccaaaccctgctgttaaaaaaaggggaagtgtttgcgttgggaaagacaagagagatgatgtccggcgaggttctgtccgaatttttcgatatgcccgtccaggcggtatggacggaagatcggccgtacttgtccaagaaaaaaactgcaaacctcaatgtttaaagcttcggatgtgtttgggagcctccttctattatggaggctctatttcagctttcatcatcttaaagaagctggtaagataataaagaacgtcatgttttaggggagttcatcattatgatcattcaattcattcgctacagataatgaaaggtatagacaaacgcttagcccatccacacctatggctttaaaaatgccgaaggagcgggtttatttgtctatgcctttttcattgatctaaatacgaatgaatgaggtgtaacaatgatgaataaaaaattaaaaagagcagcgcttatgaaggagcatgaaacgatgtttcagtgcccgctatgcgccgcgaacatggcgatcagcgagttaaaaagccttatatgttcaaacagacatacgtttgatatcgcaaaaggagggtatgtcaatgtcgcgacgcattctccttctgttaaatatgatatagatttatttgaagccagaagaatgttagcagccgccggcttttttgaaccgatgagaggcgcgttgacagaccgtcttaaacaagccggcctgccgttttgcaattttgtcaggatcctcgatgccggctgcggggaaggttcgcatttgacgcgaatcgctgaaacgctagaagcgcgtttcggaacgcctgtccttggagtcgggctggatttggcgaaagccgggattgtatcggcggctaagcaagaaagagaggcgatctggtgtgtcgccgatctggctgccgcaccgtttcggaatcgttcattcgacgcgatcctcaatatattgtcgccttctaattacgcggaattcgagcggctgttatcggatgacggcatcgttttgaaagtgattccgagaagcggccatctgaaagaactgaggagatttttgtacgacggctcggacaaacaagcctatacgagcgaggatacggctgagcgcttcgcgtctcattttgatctgatcgacagaacggagatcgcctacagcaaacgtttagaccgaatccagctcccgccgctcatcaagatgacgcctttatcatggcgcgcgcaaaaggagcggatcaatgcctttctaaagaaggaatccgctgttatgaccgtccatctcgatattttagccggcaggaaaaaaacgaaataaaccactgaaaaggcagtctaaataaaggactgcctttcatataatcttaaaaggacatttgatcagaggaggcgtgcggtggacatgatgaatatttctgatttccagataaaagatgtcgttaacgtatcaaacggaaaaaagctcggcagcatcggcgatatcgatataaatgtaacgacaggcaaaatacaggcgatcgtcatcggaggaacggggaaagttttcggatttttcggaaaagaagaggaaatcgtcattccgtggcgaaatattgttaaaattggagaagatgtgattcttgtgcgtttaagctgatctagcacaatcagatgctgcctgatcaatcggcggacctttatccgcctgcttttttcaaaatgttgtgaacgatgagaacgtctgcaaaagcagggataaatgttgcaaacaatacatttcgtttagttttttgaaacgaaactaaacgaatgcatcaagatgtgttaaaataggagcgatatgatgaaagactacgatgtttgtcgaaaggctgatcaccatgaatacatataacccctttcgtcttgatgctccgtcaatgcttttgattgaggaatggaatcagacggcggaaaccggcggagccgtcacagccggatttacgacaaaaaacggcggagaaagcgaaccgccttttcactcattgaatacagggctgcacgttcaggatcatgaacagcatgtcatcaataacagaaaaaaggttgccgacatcctaaaaacagatctgcacgactgggtatttgctgatcagacgcatgaagaccggattcataaagtgacggatggcgatcgcgccagcggcgctttccgatacgatacggcgctgaaggctacggacggactttatacagacaggccaaacctgtttttggcgctttgctttgccgactgcgttcccgtttatttttacgatccggtccgctcgctggtcggcatcgctcacgcgggctggaaaggcaccgcacttgggatcgccgccagcatggttgacacgtggatcaggcgggaagggtcgaatcccgcagacatccgtgccgtgatcgggcctgcgatcggttcgtgctgctacactgtcgacgatcatgtaatagacaaaatcagaaatcttcctcttcagcaagaagacaaagcctttttgacgataaaagaaggggagtaccgtctcgaattaaaagaagtgaacaggcagctgcttgtacacgccggaattccaaacggccagatcgaagtgagttccctttgtacgagctgcgagcgttcactgtttttctcccatcggagagaccggggaaaaaccggacggatgatgtccttcatcggattaaaggaggtatagcttacaggtggatgtaaaaagcaatttacgacatataaatgacaggatcaacgaagcgtgtatcaaagcgggcagaacgcccgacgaaatatccgtcatcgctgtcacgaaatatgtttccccggaacgggcgcaggcagcgctggatgcaggaatcaggcatttgggtgaaaaccgtgataccgggctgcttcacaagctcgacgttctgaaagacagcgaaccggtatggcattttatcggaaccctgcagacgagaaaggtaaaagcaatcatcgatcatgtctcatatatccattctttagacaggctttcactggccgatgaaattcaaaagagggcaaaaaaaccgattgactgttttgtccaggtcaacacatcccttgaaccttcaaaacacggcatggcaaaagaagaagttcttccttttgtaaaaaaactgtctggatacgaaaacattcggatcgcgggattaatgacgatggctccttttacggatgatgagaaggcaatcagaagctgttttcgcttgctgagagagctgcgcgacgaggtgcggggccttgatcaatggaacgctccgtgcagcgagctttcgatgggtatgtctaacgactatgcgatcgcagtcgaggaaggcgcgacattcgtcagaatcggatcttccttagtcggaaatgaaactggaggtggacaatcatgagtttgaaaaacaaatttaaaaactttttttccttggatgatgaggaatacgaatacgagtatattgaaacagacagggaggaaatccctgaagagcatgaatcaaaagacagaaccgcctaccagtctaaagcggctgggaagcagaatgtcgtaagtttgcaaagcgttcagaaatcttctaaagtagtgttaagtgagcctcgggtgtacgcggaagcccaggaaatcgcagaccatatcaaaaaccgacgcgccgtcgtcgtgaacctgcagcgcatccagcacgatcaggcgaaaagaatcgttgatttcttgagcggaactgtatatgctctcggcggcgatattcagcggatcggagcggacatctttttatgcacgcctgagaacgtcgatgtttccggcacgatttccgagctcatagaagaagaacatcagaggtggtaaatcgcagatgatcctactttatcaaattttaagcacgcttttaaccgtctattcttttgcgctcattatttacatttttatgtcttgggtgcctaatgcaagggaatcttcattcggccgggtgcttgcttcactttgcgagccttatctcgaaccgttcagaaggatcattcctccgctcgggatgattgatatttctccgattgtggcgattttcgtcctgaaattcgcagatgcagggcttcttgcggttttcagaatgctcggcgctttttaattgagatcatgccgatttcccgtaaggacttgccggcggcagcggcgccgcttttcatgagtgtgccttcaatctttgcgggccgagtatcgggcttggctgtagccaggcctctttacatagaaaggaaagacaatgagcgatatttaccagcatttcagaaaagacgaagagccgtttatcgaccaggctcttgagtggaaaagaatcgtagcggaacagtaccggatgaagctgaccgattttttggatccgcgggaacaggtgatcctgcagtctgtcatcggtcagtcggacgaagtgaggcttgaatttttcggggggttccctgaggctgaacgaaagcgggctgtgctgttccccgaatatgccgagccgtctgccgaagattttcagcttcaagcctgggaagtcatctacccgcaaaaatttgcctccatcgagcatcgcgagcttctcggctcattgatgggcatcggattgaagcgccaaaagttcggcgatctgatcttttcggacggaacatggcagtttatctgttcggaagaagtcgctgattttgttttcacccagctgacacaaatcggcaaggtgaaagtttcccttgaaaaaattccgctttcaaagcttaaagtaccggagcaggatgtcgaaataagggatgatacggtttcatctttgaggcttgatgcgatttgctcggcaatgagcaggcaatcccggcagaaagcacaggttcttgtgaaaaacggcctcgtgaaagtgaactggaaagtcatcgaagacccttcatatgcactggctgaaggggatatggtttcgatccggggatttggccgcttcagaatgaaaaacattgacggcaaaacgaagaagggcaaatggagattgacgtttgaaaaacaaaaatgacgcgttttaacagttttttctccgcccggtcgaattttgctttataatgttgactaggacaagtgtacataaagaaaaaaatggaggtgggcagcatgcctttgacgccaaatgacattcataataaaacatttacgaaagcgttccgcggctatgatgaagatgaagtgaacgaattcctggcccaggtgaggaaggattatgagatcattctgcgcaaaaaaaatgagcttgaaacaaaggtgaacgagcttgacgagcgtctcggccatttttcgaccatcgaagagacgttgaataaatcgatccttgtcgcacaggaagcggcagaagacgtaaagcgcaattccgagaaagaagcgaagctcatcatccgtgaagctgagaaaaacgctgatcggatcattaatgagtctctttcaaaatcgagaaagatcgcgatggaaatcgaagagctgaaaaagcagtcaaaagtgttcagaacccgtttccaaatgctgatcgaagcgcagcttgacctgttgaaaaacgatgactgggatcatttgcttgaatacgaagtagacgcagtaatggatgaaaaggaatagattttcgtttgcaatcttgacataccgtcatctgttcgcatataatacgttcataaattgagtgaaaaacgtttgagagggacagacattgattcctgaaaacaatgaaagcgacccgggggcggtgtaagcccgggattgttggaatcgttgtgtatcagccctcaagtttcctttctgaaccgtccagtaggaaaggacgtcccatcacgttacgatgtttgagcggataagccgaatcggcttgtctaaaagggtggtaccgcgagatcaaagccttctcgtcccttatgggatgaaaaggctttttttgttttagaaaagatgttttggaggaatggtaatggattataaagacacgctcttaatgccgaaaacagattttccgatgagaggaaacctgccgaaccgcgaacctgaaatccaggggaaatgggaggatatggacatttacagcctcgttcagaaacgtaccgaaggccggccgatgttcgtgcttcatgacggaccgccgtatgcgaacggcgatattcatatggggcatgcacttaacaaagtactgaaggatttcatcgtccgttcgagatcgatgagcggctatcatgcgccgtacgttccgggctgggacacacacggcctgccgattgaaacagcgctcacgaagaacaaaaaagtgaagcgcaaagaaatgacagttgccgaattccgcaaactttgcgaagaatatgcatggcagcaaatcgaaggccaaaaagcgcaatttaagcggctcggtgtcagaggagattgggaaaatccatacgtgacgcttaagcctgagtttgaagcgcagcaaattaaagtattcggcgaaatggcgaaaaaaggctatatttacaaagggaagaagccggtttactggtctccttcaagtgagtctgctctggctgaagcggaaatcgagtaccatgataaacgctctccgtctatctatgttgcatttgatgtaaaggatggaaaaggcgtattaacaaacggcgaaaagattgtcatctggacgacaacgccgtggacaatcccggccaacctcggcatcgccgtacatcctgaactggagtacagcgtcgttgctgccggcggcgcgcgctacgtgatggcaagcgcattgattgaaagcgtggcaaaagcgatcggctttgaagatcatgaagtcgttcagactgttaaaggtaaagatttggaacatatcgtcgcagttcatcctctatacggcagagattcgcttgtgatgctcggcgaacacgtaacaacagatgccggtacaggctgcgttcataccgctcctggacacggggaagacgactttatcatcggtcaaaaatacgggcttgacgtgctttgtccggttgatgaaaaaggacatatgacgagcgaagcccctggttttgaaggactgttttacgatcaggccaacaagccgattacagaacagctcgaagaaaaaggcgctttgctgaagcttgatttcatcactcactcctatccgcacgactggagaacgaaaaaaccgactattttccgtgcaaccgcccaatggttcgcttccatcaaagactttagaggcgagcttcttgaagcggttaaagaaactaaatgggtgcctgaatggggcgagacacgcctctacaatatgatccgcgaccgcggcgactggtgtatttcaagacagcgcgcatggggcgtgccgattccggtattttatgcggaaaacggggagccgatcatcacggacaaaacgatcaaccacgtttctgaactattcagggagcacggttcgaacatttggtttgaaaaagaagcgaatgaactgcttccggaaggctttactcaccctggaagcccgaacggcaagtttacaaaagagcaggacatcatggacgtctggtttgattcaggttcgtctcatcaggccgtactggaagagcgcgaagatcttgtaagacctgccgacttgtatctggaaggatctgaccaataccgcggctggtttaactcatcgatttcgacagcggttgccgtaacaggcaaagcaccttataaaggcgtgctttcgcacggttttgctcttgacggagaaggccgcaaaatgagtaaatcactcggcaatgtcgttgttcctgcaaaaatcatgaaccagttcggggcagatattttaaggctgtgggttgcgtctgtcgactatcaggcagatgtccgcgtgtctgacgcgatcttaaagcaagtcgcagaagtgtaccggaagatccgcaacacgttccgcttccttcacggaaacattactgattttgacccggcgaaagatgcaatcgctgtggaagatctgagagaagtcgatcagtacattttgatcaagctgaacagcctcattgaaaaagtcaaaaaagcgtatgaagaatacgattttgcggtcatttaccatgctgtccacaacttctgtgcgatcgagctcagctcattctatatggactttgctaaagacgtcgtttatattgaacacgccgatcataaagaccgccgcagcatgcagaccgttttttacgaaacgctgcttgcgcttgtcaagctgatcgcgccgattctgccgcatactgcggacgaaatgtggagccacttcacattcgtatcggaaaaaagcgtgcagcttacagatatgccggaaacaagagacattccgaatgcaaaagagacggaagagaagttcgacagcttcatgaagctgcgcgacgatgttcttaaagcgcttgaaacagcacggaatgaaaagatcatcggaaaatcttcggttgccagcttgacgctgtatccgaatgaagaagctaaagcgctgctttcttcaatcaaggaagacgtcaaacagctgttcatcgtgtcggagcttgccatcggcggaacggaagccgatgcgcctgaggatgcgcagtcgtttgaaacaggaaaaatcgtcgttgctcaggcagaaggcgagacttgcgagcggtgccgcatggtttccaaagaaatcggcgaggatcccgatcatccggaactctgccctcgctgtgctggaattgtgaagacgtattatcaaaattaaccatgaagcggttcggagtttttccgaaccgcttttagcatgccgccaaaccttatcatttgctgtcatgcctgctaagtaaataaaaaggatcggcagctaacctgcttgaacgccgccgccacatcctgtgaaagtccgcagtaaggatgccattgctgacatcgttttgtacgtcaggaaaaatcttttgggcttggataccggcattgtcggtaacactaaggtcacaaacgataagagcaggagttgatgtaggcgtgaacgagcagctggcggcaattcataccgaacttcttcaaatgaaggaagagttggaagcaaggctttttgaatactccttttttcagcaggattctcagggcatcagttcgtatcagcaggcaacacttatgtatcatgtaaaagaagagcttcaggacgtgcttttggccctttcaaaaatcgaaaacggaacatacggcatttgcgaagaaacaaatcaggctattccgctggcaaagatggctattctgccgacggcgcgcactgcgaacgattttttatatcatgcccaatttgaaaaaaagacgcttcctatttgggctgagacggatgaaacgttcaaccgggcgctctactcataacattctgcaagaggggagggcatttgccctcttgcaggatgtcaatgaatattcctttactccttttctttttcttgttaaaatgcttaaatgaagagaaacagaaactggaggaacggtttgtgccttattacataattgcgctgctcattatcggtatcgatcaatttacaaaatggctggtcgtcagcaaaatggagtacggtgaaagcatccccgtcatcgatggcttctttcagattacgtcgcacaggaatacaggtgcggcatggggcattttggccgggcagatgtggtttttttacatcattacgacggtggtgatcatcggcattgtatactacattcaaaaacatgcaaaaggacaaatcctgctcggaatcgctctcggtttgatgcttggcggtgctgtcggcaatttcatcgaccgcgtgttcagacaagaagttgtcgattttatccacgtgacgatcgtcaattatcactatccgattttcaacattgccgattcatctttatgcatcggagtcctgctcttatttatacaaatgctgttagacggaaagaagaagaaggagctgtaacatggagcattatgatatgaccgttcatgaagaacataaaggtgaacggattgacaagtacttgaccgcagttgaagcggattggtcgcggactcaagtacagcagtggattaaagaagaccgtgtgctggttaacggaaatgcggtgaaagccaattataaagttcaggaaggggatgcggtgtcagtccaggttcccgaaccggaaccgctggatgtcacggctgaaccgatggatcttgatatttattatgaggaccaggacgtactggtcgtcaacaagccgcggggaatggtcgttcatccggctcccggccatttgacagggacgctagtcaatggtttgatggcgcattgtgacgacctgtcaggcatcaacggcgtgatgagaccggggatcgtccaccggattgataaggacacttcaggcctgttgatggttgccaaaaacgacatggcgcatgagtcgctcgtgaaccagcttgtcaacaaaacagtaacgagaaaatacaccgcgctcgtccacggcgtcatcccgcatgaccacgggacgatcgacgcgccgatcggcagggataaaaaagacaggcagagtatgacggttacaagggaaaacggaaagcatgccgtcactcattttgaagtaatcgaacggttcgacgattttactgtcgttgaatgccagcttgaaacggggagaacccatcaaattcgcgtgcatatgaaatatatcggctttcctctcgcgggagatccgaaatacggaccgaaaaagacggtcgatttcaacggccaggtgctgcatgcgggcgtattggggtttgaccatccgcgtacgggagaatatgttgaatttgaggcgcctctgcctgacgacatgaaaaacctcctcgacaaaattcgaaataaacgttgacagacgttttcttttttgaaataataaatgcagttaaatcagattctttaacacagtccagagaggctgagaaggataccggacaagcgaatcaatgaattcgtttaaagacccctctctgcctttatgcagaaggggtttttgttttatcctttaaaagatgcgaggtgtttggccatgcaagagcaggaaaaggctgttgtgcttgacgaacaggcgatcagaagggcgctgacaagaatcgcccacgaaatgattgaacgaaacaaaggaatgaacaactgtatccttgtcggaatcaaaacgagaggcatctatctggccaaacggcttgccgaacggattgagcaaatcgaaggaaacaaagtcaccgtaggagagctggacatcaccctttaccgggatgatctctccaaaaaaacgtccaataaagagccgcttgtcaaaggagcggacattccggcggacatcaccgatcaaaaggtgatcctcgtcgatgacgtgctttacacgggacggacggtcagagcggccatggatgcgctcgtcgatgtcgggcggccttcatccatccagcttgcggtgcttgtcgaccgcggccacagagagctgccgatcagagccgactttatcgggaaaaacatcccgacgtcgaaaaccgaaaaggtcatggttcaattggaggaagttgacggacgcgaccttgcggcgatttataaaaagtgaatgataatcctataatccttttttaaatgcattccagtgagtttgcaaagagggatggaacgaaagaaagccgccttaccgtgcggcggtctttgtctgcctctttgcgcaatttaagcaaagaggcttttttaatgggcataaatcatttcaggatatgaagacatcatagacagtgagtcgatcatcaggaggaaaaaatatgagtcagaaaaaagtgaaccttggtgtcagagaagtaccaaaacctttgaattggatatctttcagcctgcagcatctgtttgccatgttcggagcgacgatccttgtgccgaagcttgtaggcttaagcccgggcgtggccctcattacaagcgggcttggaacgcttgcgtatctcttgattacaaaaggacagatcccggcttacttaggttcatcctttgcatttattgccccgattatcgcggcaaaagccgccggaggccctggcgcggccatgatcggcgcatttatggcaggcatcgcctacgggctgatcgcccttctcatccagcagcttggaacggactggctgatgaggcttctgccgcctgttgtcgtcggtccggtcattatcgtcatcggactcgggctggcaagcacggctgtcaatatggccatgtatgaagattcgggagcaaaagtgctcgtctacagcgccaagcattttggcgtcgcaggattcacactcgcgctcaccataatctgcgcgattttcttgagaggatttttcagcctgattcctgtcttgatcggaattatcggcggatacttgttcgccctgacccagggaatcgtcgacttccagatggttcttgacgccaaatggtttgctgttccggacttcgtgcttccgtttgtcgactatacgccgagcgcggcggctgtcggaatcggaatcgccatggtgcccgtcgctttcgtgacaatgtcagaacatatcggacaccaaatggtattaagcaaggtcgtcggccaggattttattaagaagcccgggcttcaccgctcgattttcggcgacagcgtcgcaacgatgcttgcatcatgcatcggcggacccccgacaacgacttacggagaaaacatcggcgtactcgccatcacaagagtattcagcgtatttgtcatcggcggagcggctgtcattgcactgtgcttcggatttatcggcaaaatttcggccctgatcagctctgttccttccgcagtcatgggaggcgtttccttcctgctgttcggtatcatcgcatccagcggactgcgcatgctgatcgataataaaattgacttggaaaacaagcgaaacctgatcatctcatccgtcattctcgtcatcggagtgggcggcgcatttatcaagatctcagggtttgagctgtcaagcatggcgcttgcggcgatcgtcggagtggttttaaaccttgtcctgcctgaatcaaagggagatcaggacggaattgaaatagaagagcatatttaaaaaccttttaaatgaagtccagagaggcttgaaagggttgcggagagagaagtgcaaaaaagcgcattctctgattcactgtaccccaagccgttatggcctggggtttttttacgggaaattaagcctgagggggagaaaaaatgaaacacttgaccgcaatgaatgagcttagtcttgaggatattcacgagctgattgaagaggcgagagagctgaaaaaaggcaagtccgattccgttctctccggaaagttcgctgccaacctgttttttgaaccgagcacaagaacgcgcttcagcttcgaagtggctgaaaagaaactcggcatgaatgtgttgaacctggacggtgtttcaacgagcgtacaaaaaggagaatcgttgtacgataccgtcaagaccctcgaatccatcggcgctgatgtatgtgtgatcagacactctcatgatcattattacgatgaactcatcggacatgtcggcattccggtgatcaatgccggagacggctgcggtcagcatcccactcagtctttgctcgatttgatgacgattcacgaggaatggggcagatttgccggactgacggtatccatacacggagatatcaagcacagcagagtggcaaggtccaatgccgaagtgctgacaagactcggagcaaaggttcttttctcaggtccagacgaatggcgggatgaagacaatccatacgggacatatgtgtcgcctgacgaagcggttgcacattcggatgtcgtgatgcttctccggattcagcacgaacggcatgagaaaaaggcggcagaacgcgattatctcgaaacattcggattgtcgctcaagcgggcggagctcttgaaaaaagacgcggtcatcatgcaccccgcacctgtcaaccgaggcgtcgagattgacagtgcactggtcgaatccggccggtcgaggattttcaaacaaatggaaaacggagtatatatcagaatggcggttttaaaaagagcgcttctaaacggcgaaaacaaaaaaaggggagatcaggcttatgtcttatttaattaaaaacggtttcatgctcgacgaaaaaggcgaaaaagtacagcgcgatatcagggttgaaggcgatgcaatcagcgagatcggaagccttgaggccgcttcgggggaaacggtcatcgatgcggatggacttttcgtctcgccagggcttgttgaccttcacgttcacttcagagagccgggcggcgagaagaaagaaacgatcgaaacaggtgcaaaagccgcagcgagaggcgggtttacaactgtcgccgcaatgccgaatacccggcctgtccccgatacgaaagagcagatggagtggcttgtcaaccgcattgacgaaacggcatcagtgagagtgctgccgtatgcttcaatcaccatcaggcaaacaggtcgggaaatgaccgatttcgaagggctgaaagacgccggcgcgttcgcgtttaccgatgacggcgtcggcgttcaaacggcggggatgatgtatgaagcgatgaaaaaagcggcttcgattaataaagcgatcgtcgctcactgtgaagacaattcactgatctacggcggcagtgtacacgatggggaatttgccaaagccaacggtttaaacgggattccttcggtgtgcgaagcggttcacatcgcaagggatgtgcttcttgccgaagcggcaggctgccattaccacgtctgtcatatcagcacgaaggaatcggtcagggtcgtccgcgacgccaaaaaagcgggaatccgcgtgacggcggaagtgacgccgcaccatctgctcctttcagacagcgacattcccggccttgatacgaattataaaatgaatccgccgcttagaagtccggaagacagggaagcgctccttgaggggcttagagacggaacaattgattttatcgcaacggatcatgccccgcatacagaagaagaaaaacaacagacaatgagccttgcgccttttggaattgtcggcttggagacggcttttccgctcctttacacgcactttgtcaaaacaggcaaatggacgctgaaacagctgcacgattatatgacggtcaaaccttgcgaggcgttcgggctgccgtacgggaagcttgaagccggacggtccgcggatattacgctcattgatcttgaacgcgaagaaaaaattgataaaagcacctttctttctaaagggaaaaacacgccgtttgacggcatcagctgcttcggctggccggctatgacaatggcaaagggaaaactcgtttaccaagaggggagacttgtaaaatgaaaagacgtcttatattagaaaacggaacgatttttgaaggggaagcattcggcagcctggaaaacaccatgggagaagtcgtcttcaacacggggatgacaggctatcaggaaatcctctcagacccgtcatactgcggacaaattgtcaccctgacctaccctttgatcgggaactacgggatcaacagagacgactttgaatccatcaccccttatgtaaaagggtttatcgtaaaggaattatgtcaacttccatcaaactggcgctctgcttatacacttgatgaatatttaaaaatgaaaaacatcccgggactctcagggatagacacgagaaagctgacaagaatgatcagaacggcaggtacgctgaaaggggtatttgccggccctgaagaagatgctggggctttggttcaaaagctgaaagaaacgaaccttccgaccgatcaggtcagccaagtatcaacaaaaacggcatatccgagccctgggagagggaagcgaatcgtgctcgtcgatttcggaatgaaacacggcatcttaagggagctgaacaagcgcaaatgcgatgtgatcgtcgttccccacaatataacggcagaagaagtgatgcagctgaagcctgacggcgtaatgctgtcaaacggacccggagatccaacggacgtaccggaagcgattgcgatgatccaaaacattctcggcaaggttccgctgttcggcatctgtctcggccatcagctgtttgccctcgcctgtggagcaaagacggagaaaatgaagttcggacaccgcggttccaaccatccggttaaagagcttgaaaccggcagagtatcaattacggctcaaaaccacggctataccgtatcgtctgttgaaaacacgccgcttgaagtgacccatgtggcgataaacgacgacacaatcgaagggcttaaacataaacacgaaccggcttttacggttcaataccatccggaagcttcaccggggccggaagacgcaaaccatttatttgatcaatttttagacatgattgaaaccacagagaaagaaggggaagcggtatgcctaaacgcgtagatatcaaaaagattttggtgatcggatcggggccgattattatcgggcaggcggcggaatttgattatgcaggcacacaggcctgcctcgctttaaaagaagaaggctatgaagttattctcgtcaactcgaatccggcgacgatcatgacggatacggaaatggccgaccgcgtgtatatcgaaccgctgacgcttgaattcttaacacggatcatccgcaaagagcggccggacgccatattgccgacattgggcgggcagacgggcctcaacttggcggtcgaactgtcagagcacggcatcttggctgagtgcggcgtcgaagtgctcggcacgaaattgtcggcgatccaaaaagcggaggaccgcgatttgttcagaagcttgatgaatgagttgaatgagcctgttccggaaagcgagatcatccactcgctcggcgaagcgcgcgagtttgtcgagcgcatcggtttccccgtcatcgtcaggccggcatacacgcttggcggaacaggcggaggcatctgctcaaacgaagacgagctgaaggaaatcgttgaaaacggcttaaaaatgagcccggttcatcaatgcctgcttgaaaagagcatcgccggctacaaagaaatcgagtatgaagtcatgagagactcgagcgaccatgcgatcgtcgtctgcaatatggaaaacatcgatccggtcgggattcataccggggacagcatcgttgtagcaccgagccaaacgctgagcgaccgcgaataccaaatgcttcgcaatgtctcgctgaaaatcatccgcgcgcttgaaatcgaaggcggctgtaatgttcagctggcgcttgacccggacagctttcagtactacatcatcgaggttaacccgcgggtcagccgttcttctgcgcttgcctcaaaagcgacgggctatccaatcgcaaagcttgccgcaaaaatcgctgtcggtttgtctcttgacgaaatgatgaatcctgttacaggaaaaacgtacgcgtctttcgaacctgcactcgactatgttgtgtcaaaaataccgcgctggccgtttgacaaatttgaatcagcaaaccgcaggctcggcacgcagatgaaagcgacaggcgaagtgatggcgatcggaagaacgtgggaggaatctctcctgaaagcggtccgttctcttgaagcggatgtctaccatctggaactgaaagatgccggtgagatctcgaatgaagtgcttgaaaaacggattaaaaaagcgggagacgaacggctcttttacctggccgaagcgttcagaagaggatacacagtcagcgacctccacgaattttcggcaattgacctgttcttcctccacaagcttgagggaatcatccgctttgaagagaagctgaaagccggacgcggcgacctcggccttttaaaagaagcgaaagagctcggcttttcagaccgctttatcagccttctctgggagatgcctgaacgaaagctttatgatcttagaaaagaagcaggcatcacgcctgtttataaaatggttgatacatgcgcggccgaatttgaatcggagacgccgtatttctacagcacgtatgaagaagaaaacgaatcggtcagaacggacaaaaacagcgtcatcgttcttggctccggtccgatccggatcggccagggggtcgaattcgactatgcgaccgtgcattcggtctgggcgattaaagaagccggctatgaagccattattatcaacaacaatcctgagacggtttcaacagacttcagcatatccgacaagctctactttgagccgcttactgttgaagatgtcatgcatatcatcgatttggagcagccgaaaggcgtcgtcgttcagtttggcggacagactgcgatcaaccttgccgacgagctcgcagaaaggggcgtcgccattctcggaacatcccttgaagatttggaccgcgccgaggaccgcgacaagttcgaacagacgcttgaaatgctgcaggtaccccagccgcttggaaaaacggcgacatctgtggaaggcgccgttgaaatcgcagccaatatcggctatccagtgcttgtccgcccatcgtatgtactcggcggacgtgcgatggagatcgtctaccatgaagcagagcttctccattatatggaaaatgcagtaaaaatcaatccgcagcaccctgtcctgatcgataaatatttgaccggaaaagaaatagaagtggatgccatttctgacggtgaaacggtcgtcattccggggattatggagcacatcgaacgggcgggcgtccactcgggggattcgattgccgtttacccgccgcaatccctttcagaggacatcaagaaaaagcttgaagcatacacgattaagctagcaaagggcttaaacatcgtcggcctgctcaacattcagtttgtcctttcaaaagatgaggtttacgtccttgaagtcaacccgagatcgagccgaacggtgccgtttctcagcaaaatcaccggcattccgatggccaatctcgcaacaaaggtgattctcggagggaagcttgccgatatgggctatacagaaggcctccaaaaagagcaggaaggcgtatatgtgaaagtgccggtcttctcgtttgcgaagcttagaagagtggatatcacgctcggaccggaaatgaaatcgaccggggaagtcatgggcaaagacagcacattggaaaaagcgctatataaaggactgatcgcttcaggcattcaaattccgaactacggctctgttctcctgacagttgctgataaagataaagaggaagggctgttgatcgccaagcggttccatgcgatcggctataaaatcttggctacggaaggaacggcaggctatttaagagatgcatccgtacctgttaaaaccgtcgggaaaatcggcgaagaaggtacaaatctccttgatgtcattcgaaacggggaggcgcagttcgtcgtcaatacgctgacaaaagggaagcagccggcaagggacggcttcagaatcagacgcgaatccgttgaaaacggcgttgcctgcctgacatcccttgatacggcggaagcgattttgcgggtgcttgaaagcatgagcttccgcgccgatcatatgccggcgattaaaatcgcccaaaaggcggccgtcagatgagaaaagggtatatgacagtccgttcaaacaagtgcatcgcggatcatatttatcaaatggtgcttgaaggggagattgccgaagtttgcggcgctcccggccagttccttcacatcaaggtctcagacaccctcacgccgcttttgaggcggccgatcagcatcgctgatatcaacaaagccgcccggcaggtgaccatcatctttcgcaaagatggggaaggaacgagactcctttctttaaaacaggaaggagatcagctcgatgttctcggtccgctcggcaacggttttccggctgaatcgcttgaacaggggaaaacggctcttctcgtcggaggagggatcggtgttccgccgctttacgagctgagcaaacagctgacaaacagaggggtgcacgcgatccatgtgttaggatttgcttctgcaaaagatgtcttttacgaacaggaattcagccgtttcggccgggtgtatgtggcaaccgcagacggcacccgcggttcaaagggatttgttacagatgtcattgaaaacgaggggcttcagtttgactgcataatggcctgcggaccgacgccgatgctgaaagctttaaaacagcgctatccggataaagaggtatatctgtcaatggaggagcgcatgggatgcgggatcggcgcttgctttgcctgtgtctgccatacggaagaaagcgaaacgtcttatgtgaaggtatgccttgacggtcctgttttcaaagcccaggaggtgctgttatgatgcttgaaatcaatttgccgggccttcaattgaaaaatccgatcatgccggcctcaggctgcttcggattcgggagagaatttgcgaacttttacgatctttcgcgtctcggtgcgatcatgattaaagcgacgacgagcgagccgcgcttcgggaatccgacgccgcgcgtcgccgagacgcaagccggcatgcttaatgccatcggcctgcaaaatccgggtttaaaggctgtcatggaacgcgaattgccgtggctcgaacagttcgatacaccgattatcgccaatgtcgccggctcgcagatcgaggattatgttgaggtggctgaagaaatcagcaaagcgccaaacgttcatgcgctcgagctgaatatttcctgtcccaatgtgaaaaccggaggcatcgccttcggcacgcagccggaaatggccggcgagctgacgaaagcggtgaaagaggttgcgagcgtccccgtctatgtgaagctgtcgccgaacgtcgcgaacattaccgacatcgctcttgccatagaagaagcgggagcggacggtttgacgatgatcaacacgctgatcgggatgcggctcgacttaaaaacgggaaagccgattttggcgaacaaaaccggcggattatcaggacctgccgttaaaccggtggccatcagaatggtgcatgaagtcagccaaaaggtcagcattccgatcatcggcatgggcggcgtccagtcagccgaagatgtgcttgagtttttgctggcgggtgcgagcgcagtcgccgtcggcacggcaaacttcgttaatccgtttgcttgtcccgacatcatcgacgatttgccgcgcgttttagaaaaatacggataccgttcgttgaacgagtgtatcggaaggagctggaaggatgaacaatacgccgcccatcatcgcgcttgattttgcatcagcacaggaaacatatgcgtttttggaccggtttcaaggagaagagctgttcgttaaggtgggcatggagcttttttatcaggaaggacctgccatccttgaaaatctgcaggagcgcggctgccgcattttcctcgatctaaagtgccacgacattccaacgaccgtatacaaggcgatgaaaaggctggcgggatttggcgtcagtcttgtcaatgtgcacgcagcaggcggaaagcaaatgatggagtcggcgcttgaaggccttgaagcggggactccggcaggccaaaaacgcccttcattaattgccgtgactcagctgacaagcacgtcctcagaaatgcttcagcgtgagctcctgattgaaacgccgcttctcgatacagttgtccactacagccggctggctgaagaaagcggtcttgacggcgtcgtctgctccgttcatgaagccgaacacatttaccgggctgtgtctgtagattttctgaccgtgacacccggaattcgcatggcagatgacaaaaacaacgaccaggtccgggtggcgacgcctggctacgcaagggaaaaaggcgtgtcggcgatcgttgtcggccgttcgattacccaggcggaagatcctgtgtcagcctacagaagaataggacatgagtgggagggaaccaaggcatgaaaacagacattgcaaaccatttattaaaaatcaaagcggttttcctgcgcccgaacgaaccgtttacatgggcgagcggcattctgtcgcccatctactgcgacaaccgtttgacgctttcatatccggaagtaagagatgatatcgcttcagggcttgccggactgattcaagacaaatttcccggagccgagatgatcgccggtacagcgaccgcgggaatccctcatgccgcgcttgccgctgacaggctgagcctgccgatgtgctacgtcagaagcaaaccgaaggcgcacggcaaaggaaaccaaattgaaggggccgttgtaaaaggacagaaagtcgttgtgatcgaagatttaatttcaacgggaggaagcgttcttgaagccgccgccgccctcacagaggcgggatgtgaagtgctcggcgtcgccgccattttcacttacgggcttccaaaagccgccgccgccttcagcgaagcaggcgttgaataccacacgctgactgattacgatacgctgaccgaggctgcgcttgccggtggatatattactgaacaggatgccgccaaactgaaagaatggaaagcggatcctgaaagcaagtcttggatgaactgatgatcaaagccgtattctccaaatgggagaacggcttttttgcgcctttttgccgtttttaaaatagtaaaatcggattatttttattttttattaatcctataaaaaaagtcgggttgacttttattcgaattgtgctaaaattttaaaataacaaaagcaaacttatcaagagcggtggagggactggtccgatgaaacccggcaacctgcgtgtgaagcgtaaggtgctacttccagcaaaatgccctcattttgagagataaggaatagcggagttcctcgtctttctttcaaaattggaagaaagattttaattttttaggggcagaggaggagctagaagtgaagacagatgaacagcttgaaaaggtgatcatcaaaatgaaagacatgctgaaagacatgaattacggatcgatcacattcgttgttcaggacggcaaagtcattcaaatcgaaaaaaatgaaaaaataagattgaaatagctgactagacaaactagaggcggttttcacagttttttttctgctggaagccgtttttttgttggcgaaaaaagggggaaccgaaaatttttacttacagcacatgggaggaaccaaacatctcttttcaggaagatgactcttataaaggagcgctgtccgtcctgaaatgggcgtacggacattacggggatcagctcgtatacgcgtgcagcttcggaattgaggggatcgtcctgatcgatttgatttataaggtgaaaaaagatgcagttatcgtttttcttgatacagggcttcattttaaagaaacgtatgaaacgatcgacgccgtcaaagaacgatatccaggccttcagattatcatgaaaaaaccggagcttaccgtcgaagagcaggcgaaagaatatggggacgaactatggaagaccgctccgaattcctgctgcgaaatgaggaaggtcatccctctccgcgagacgctttcaggctacccggcgtggctgtctggtctgcgccgcgagcaatcgcccggacggagcaaaacgaattttttgaacaaagatgaaaaattcaagtctatcaaagtttgtccgctcattcattggacgtggaaggatatttggagatatgtgacaaagcacgatctcccatacaatccgcttcatgatcaaggctatccgagcatcggctgcgctccgtgcacctctccggcctttacaatggatgatcttcgatccggccgctggaacggatcggctaaaacagaatgcggattacacgagtaaggagatgagtcatggaacttgccgccattttatttagcatgttttttgcgatgaatatcggagcgagcggtgcagctgcttcaatggggatcgcctatggatctgaagctgtcaaaaagaagtttcacgccctcctgatctgtgcagcgggcgttctctcgggcgctgtcatcggcggaggaaacgtcgtgaaaacgatcagttcaggcatcattcccgaacgggtgatttcgcttgaaatcgtctgcattattatcggatcagcggcgctgtcgctctttatcgcaaatgtactcggcattccgctttcgacaagtgaagtgacagtcggatctgttgtcggagtaggtgtcgcataccaggttttgtatgtcaaatctttgcttgtcatcgtctcattttgggtcattgtaccaatcgtcgcttttgcatttacatttgcgatggcaaaaatcatgaaaaaaacgatcaaacgtccagcctcgggaaaaaaagcaaaggttttggcggtcattctattgatcacagggttttttgaagccttctcagcgggcatgaacaatgtcgcaaacgctgtcggacctctggtggcggcgcatgttttgacagtcggggaaggaacgctctacggcgggctgtttgtcgcgctgggcgcccttttactgggcaggcgcgttcttgaaacaaacggcaaaaagattacgaggttttcaaaaggagagggaatcatcctttccggaacgggggccgggcttgtcattaccagttcaattttcggtttaccggttccgcttgcgcaagtcacatcatcttctattatagggatgggaatggcaaaaaacggcggcaacgtctttcataaacaagtggtcaaaacgatgctgaaagtatgggtcgtctcgccgttcctttcattaagcctatcttatatgctggtcagccttttattaaaaggagactactacgctcttattgttgtcacaagcgttctgctggcatctgtcggaacgatcagcctgatgagagcggtcaaaaaagagcacagctccgtccatgaacaaggcggaggaatttaaacacaaagtagggggaaacaagtttatgagtttagcaccacacggcggtgtattggttaaccgcgtcaatgaagcatacgattttcaacatatcgcacatgaaattgagcttgatgtaatggctttttcagatttggagctgatcggaatcggtgcgtacagcccgctccaaggctttatgacagagaaagactatctgtccgttgtcgaaaatatgagactatcaagcggcgaagtatggacgcttccgatcactctgcctgttgacgagcaaaaagctttaagcttaaaagcgggtgacaccgtccgccttacctataatggggaaacctacggcgtcattgagatcgaagatatctatacgccggacaagaaaacggaagccgtcaatatctataaaaccgacgaactcgaacatccgggcgtcaaaaaattgtttgaccgcggcagcgtttatgtgggcgggccgatcacgctcattaagcggagtgtaaaacaattcccggcgcacacattcgaacctcttgaaacaagaaaaaaattcgcggaactcggctggaaaacgatcgtcggattccagacgagaaatccggttcacagagcgcacgaatacattcaaaaaacggcgctcgagacggtagacggccttttcctcaatccgctcgtcggggaaacaaaatcagacgatattccggctgatgtccgcatggaaagctatcaggtgctgcttgacggctactatccgaaagaccgcgtcttcctcggcgtttttccggcggcgatgcgctatgcggggccgaaggaagcgatcttccatgcccttgtgagaaagaactacggatgcacgcactttatcgtcggaagagaccatgccggagtcggcgattactacggcacatatgaagcgcaggagctgttcgatcagttcgcgccggaagaaatcggcattacgccgctgaaattcgaacacagcttctactgcaatgtctgcggttcaatggctacggcgaaaacgtgccctcacggcaaagaacatcatgtcattttatccggcacaaaggtgagggcgatgctgagaagcggcgagttcccgccgagcacattcagccgtcccgaagttattcaaacattaatcaaaggcttagcggccggggtttcttaagggggagcatctcttggtaaataaagatattgtctggcatgaagcgtccattacaaaacgggaatatcatgagaaaaatcaacataaaagctcaatcatttggctgacgggcttaagcggttcaggaaaatcaacgattgccaacgccgctgcgcgtgagttgtttgcacaaggctaccaggtcacggtgcttgacggcgacaacgtcaggcacgggctgaacaaggacctcgggttttccgatgaagaccggaaggaaaacatccgccggatcggcgaggttgcgaagctctttgtcgaacaggggacgatcgtcattacggcgttcatttctccttttaaagaagatcgcgggcttgtcagacagcttgtcgaggaagatgagtttcacgaagtctatgtgaaatgcgatttggcgacgtgtgaagagcgcgacccgaaaggcttgtacaaaaaagcgagaaacggagaaattccatttttcacagggatcgattcgccttatgaagagcctgaaacgcctgagcttgttcttgatacaggcgcacataaccgggaagagtgcaaaaaccagctcgtccaatacgtgaaagatcaaacgaaataaaatgcgggtgaataggaaagtgcggcgcatgcactttcctatttcataaagaaaacgtttggtttttgtgatattttcaggcaccaaacgctttctttatgatttataatgaattgaagaagacgttgatcagatcggggggagatctaagatggggaaagtatatatcgttggggcaggtcctggagaccccgatttactgacgatcaaagctttaaaagccatccagacagccgatgtcattttgtatgacaggcttgtgaataaacagattttacagcacgccaaggagggagcggatctcatctactgcggaaagcttccggactaccacatgatgaagcaggaaacgatcaatcattttctcgtcaagtatgcgaaaaaagggaaaaccgttgtcagactgaaaggcggcgatcctttcgtattcggcagaggcggcgaggaagcgcaaaccctcgctgagcacggggttgcttttgaaatcgtgccgggaatcacctcgggaatagctgccgctgcttatgcgggcattccggtgacacaccgggaagcgagttcaaacgttgctttcgtgacaggccattatcaaaaagaagaaaactttgaagagaagtggaaagcgttagccacagggatcgatacgcttgtcatttatatggggattaaaaacgtgaagcaaattgaaaggcttctgatcgaaaacggcagagacccgtcaacgccagccgctttcatccattggggaacgacagacaaacaaaaaacggtgctttgcacggttgaaacgcttgccggtacagtcgaaagcgaaaagattgaaaacccgagcctgattgtcatcggggatgtcgttcaattcagctcgcagttaagctggtttgaacctgagctgaaagatccggcattaagcgaggcgctttaatatgaaacaagcgattttatatatcggccatggaagccgtctgaaaagagcccaaacagaagcagccgcttttttggagagctgcaaagaaaacatgtccgcccccattcaggaaatatcttttttggaattggcggcaccggatatcgaaaccggctttaaagcgtgtgtggaaaagggggcgacgcatatcgcggccgtgccgcttctcctcttgacagccgcacatgccaaaagggacatccctgaagagcttgcccgtgcttcctcacagtacccttccgtcagcgtcgcttacggaaagccgatcggcgtcgatcaggaagtcgtcaaagcggtttttacaaggatcgaagaaacggggacgccatatgaacatgcaagagtcgtgttgatcggaaggggaagctctgatccggatgtcaaacgggatgtttatgatatttgcgaacggctgagagacctcacaccagtggatgaggtcattccctgctttatgacagcctgtgagccgcactacctggatgtgtttaaacagcttaaagaacgggacggaaaaacgacattcatcgttccgtatctgctgttcaccggtatgctgatgaacgagattgaaagggaaaccgcaaagctgaaagaaacgaatccgaatgtcgtgctgacggattacctcggcttccacccccatgtaaaaaacgcctttttgcaccgcgtagaggaagcggttatcaacaaagccggccgctttgattttacaggagcatcagatgctgccgctgcacattaacatgaaaggcaaagccgcagtcattgcgggcggggggaagattgcggcgcggcggctgaaaacggtgctggcagaaggtgcatccgcgaccgtcatcagccctgaagcatcagaagagatgctcggattgattaacgaacacggcatcgaatggaagaagaaaaaggcggaacccggtgatttcaagaatgcatttctgatcattcttgcgaccgatgaccatgaggcaaacaagcgtctcgccgcatcggcagctcctgagcagctcgtcaatgttgcgagtgaagcggagctgggaaatgtatatgttccaaaaataatcaacagaggaaacataaccatatccgtctcaacaaacggagccagcccgcgccacacgatcaggctggccggacagatcgatgatttgatcgatgatgagctcgtccaagagatcgacgagcttttccgaaaaagaagaggcctgaacccttgaggttcaggcttttggcattattattttttcagcttgatgatcaagtcttcatcaggtgttacaaaaacggtttgctggctgtcgtaggtgacaaaccccggttttgcgccattcggttttttgacgtggcgtatttttgtatagtcgacgggaaccgaagcggagtttttcgctttgctgtaatatgcagcgatctgcgccgcttccagaatggtttgctcgtccggatcggtcgattgaatgacgacgtgcgaccccggaatatcttttgtgtgaagccagatgtggtcgcgggcggcaagcttcatcgttaaatattcgttctgcttgttgtttttgccgacgagaatcgtttctcctgagctggactcatatgcttcgagcgtcggcgcctgttttttctgtttcttctggcccccttgctgcttggcccgcaagtattttccttcggcgagctcttcgcgaatttcggttatatctttcggtgaggcagatgaaagctgctgaatcagctggtcgaaataagcgatttcctcttctgccaatttgatctgctccttcacgacttctaccgaatttttcgctttttgatattttgtaaaatagctttgtgcattttcagaaggcgttttattaggattgagcggaatcgtgatttctccgccgttttcatcatagtagttgatgaccttcgcctctttgtccccttttttcagctggtacaggttcgctgtcaacagctctccgtacagctgatagtcttgcgcgtgttcggactgctcaagcgtttttttcagctttttgattttattttcgttctttttcttttcgtttgccgcgaaacgctctaaatcgtgagcctgctgtttgacgcggtcacgctccgcttttccgaaatagtagcggtcaagaagttcgctcagcgtatgaaagggcctgttgtctccttttatatgggtcagctcaagaaggtaaaaatattcttttccgtcttctgtggtgacaagctggggctgaaaacgccggcttttgatttcgctgaacatctccgtcaagacgtttggcagtgtcgccctgttggctagacccgcgcgaaagacggcttccttcgcaaacagaggcgagacgccggagaaggtatcgacgatctgcctgtcaagtttgccttcctggaaattcagatggcggagaatatcttcagtctccgcttcaagcggagacaatttgttctgcgcgggagggagaatgtaatcgtatcccgggagcacggtgcggtagctgttcatcgcaggtgacagatgcttcaaactgtcgatgatgacgtctttttctccgtctgttaacacgatgttgctgtgcctgcccatgatttcgaccatcagctttcttgtcagcgtgtcgccgatttcgttccggctcctgatatgaaagaccatcattctgtccatgccgatttgctcgacttggtcgataaagccgccttccagatgtttgcggaggagcatgcagaacatcggaggggtgctcgggttgtcgtaggtttcgtttgtcaggtgtacccgcgcataactcggatgggcggagagcagcaatttgcggttcttcccgtttgccctgatatgaaacactagctcgtgcttaaacggctggtggatttttgcgatccgtccgcctcgaatcgcctcatttaattcctcgatcattccgtatgtaaaaatgccgtcaaaagacatatgaaaaactcccttttctcgttaatcctcttcgtaaaacgtccattcaataattatagcatgatttgggacgagtctgaataaattgacttatagagatggatacaccaaaagcaacctttagggcaggaggagtggacgattcaatgaaatggcacgagatgggacaaaccgaattgttaaatataacaaaaacgtccatcgacaaaggtctaacagaaaaagaggccggaaagcggctggaaagacacggaacaaacgaacttcaggaaggggaaaaaacatcggcggtcgcattgtttttttctcaattcaaagatttcatggttcttgttttgcttgcggccacgttgatttcgggtttcctcggcgaatacattgacgccatcgcgatcatcgcgatcatctttgttaacggcattctcggattctttcaggagaggcgggcggaaaggtcgctcgaggctttgaaagaactgtcagctcctcaagtggctgtgctccgggaggggaattgggtgaaaattccttccaaagagcttgtcccgggagatgttgtccgttttgcaagcggagacagaatcggcgccgatctcagacttgtcgagacaaagagccttgaaatagaagaatcggcccttacaggtgaatcgctccccgtgtccaaacaggcagatgcttttcaggcgtcagatgtatcgctgggcgatctgaagaatatggctttcatgggaacgcttgtcacaagggggagcggaatcggcgtcgtcatcggtacgggtatgaactctgcgatggggaaaatcgccgatatgcttgaatctgccgggaatacggcgaccccgctgcaaagaaggcttgaagagctcggcaaaattttgattgtcgccgctttgttcctgacactgcttgtcgttgctgccggcgtcattcaggggcatgatttatacagcatgtttttagcgggagtttcccttgccgtcgctgccatacctgaagggctgcctgccattgtcacggtcgctctgtctctcggcgtgcagcggatgatcaggcaaaagtcgatcgtcaggaagctgcccgcggttgagacgctcggctgcgcgtccattatttgctccgataaaaccgggacgatgacgcagaacaaaatgacggtcacccatgtctggtcaggcgggaagatatggaacgtgtcagggatcggctatgagcctgaaggctctttcagcatgaacgggcgcgatgtgcaagcaaagcatcataaaccgctccagcaggtactattgttcggcgcattatgcaattcatcttcgattatcgaaaaagacggggagtttcgtcttgatggcgatcccaccgaaggggctttgctgacggcggctcgaaaagcaggctttacggacaaatatgttgatgaacattttaaaatcatcgaggagtttccgtttgattcaacgcggaaaatgatgtctgtcattgtggaagacaagagcggcaagcgctttgtcattacaaagggcgcgccggatgtattgatgaagcgttcgtcgcatacgctgacagaagaaaagcgagaaatcttcacaaaggaaaggctcgctgaaacaagcgcggcgctggaaactcttgcgtcacaggcgctgagaacgattgccgtcgcgtataaaccgatcaaagatacagaaaatcccccgctcgaaaaagcggagtcaggcttaactttcatcgggctgttagggatgatcgatccgccgcggcccgaagtgaaaacagcgattaaagaatgccgggaagcggggatcaaaacggtcatgatcaccggggaccatgtgataacggcgacggcgattgcaaaagatctcggattgctgcctccgcgcggaaaggtcatggacggccagatgctgaacgaactctcgcaggaagaattggcggaaattgttgacgatgtttacgtatttgcaagggtgtcgcccgaacataagctgaagatcgtgaccgcctaccaggaaaacggccacatcgtcgccatgacgggagacggagtcaatgatgcccctgcgattaaacaggcggatatcggcatatcgatggggattacgggaacggatgtcgccaaggaggcgtcctcactcatccttgtcgatgataattttgcaacgattaaatcggccatcaaggaaggacgcaatatctatgaaaatattagaaagttcatcagatacttgctcgcatccaatgtcggcgaaattttggtcatgctgtttgcaatgctgctcgctctgccgctgccgcttgtcccgatacagattctgtgggtcaaccttgtaacggacggcctgcctgccatggcgctcggcatggatcagcctgaggacgatgtgatgcagagaaagccgcggagtccgaaagaaggcgtgtgtgcaagggggctcggctggaaggtcgtatcgcgcggattcttaatcggaatcgcgacactcggggcgtttatgttcatttataaccgcaatccagaagcgcttgagtatgcacagacggttgcatttgcaacgctcgtccttgcgcagctgatccacgtgttcgactgccgaagcgagcggtccatctttgaccgcaatccgtttgaaaacatttatttgctcggtgcagtgctgtcttcgattcttttgatgcttgtcgttatttattatccgccgctgcagccgattttccatacggttccgattttaatggcagactggctcctgattgtcggaatgtcggcgattccaacttttttactggccgggtcacttttgacaagaaaaaaataggcttgtatgatataatcttaaaggtaatagaggtttctattgccttttcatcttgcgtaaatttaaatcaaagaaagtctttttcacttatacggaattgggtgtgttttatgatacggagtatgaccggtttcggcagcgcgagcaaaacgaaggatgggctgacagcagctgttgagctgaaatctgtcaactatcggtttaaagaagtaaacgcccgcatgccaagacctttgctctatttagaagacaaaataaagcaaacgatttttaaacatatacaaagggggcggctggagctgtttgtttccgttgacgacgaggctctggtcacccggaaaatccaggttgactggccgctgcttgaagagtaccagaaagccgcgcgcgaaatgaaagaccgctgcgggctttctggagacatcacgcttcaagacgcctttcagtttgagcatgtcatccaagttgaagaagagccaatccaaaatgacaagcttgaagaggttcttctagaagcggtcgaggctgccgttctagaattgtgcagcatgcgcgaagcggaagggctgaggctgaaggacgactgccttcagcatattgaaaggcttgaaaagctgacagacgacatcgcagagcttgctcccaaggtcgtcgaccactatcgggaacgccttgaggcgcggcttgaagaatggtcaacagacggtctcgatgaaagccgcctgctgacggaagtcgcactgtttgcagaccgttcggatatcacggaagaagtgacgaggctgaaaagccatttccgccagttccgcgatatttgcaaagcgggaggagccgcggggagaaagctcgatttcctcgtccaggagctcaaccgtgaagcgaacacgatcggttcaaaagcgaatgatcaccagatcacaaaacatgtggtcgaaatgaaaagctctattgaaaaaataaaagaacaagtgcaaaatatagaatagcgattgtgcgtattgtttacggatgttctctgcaggttaaactagagacgtccaagtacagggggaacgtataggatgacgattaaactgatcaatatcggctttggaaatatcatatccgcgaatcggctgatctcgattgtgagtcctgagtccgcgcctattaagcggatgatccaggatgccagagaccgcggcatgcttatagatgctacatatggaagaagaacccgtgcggttgtcattatggacagtgaccatatcatcttatctgccgtccagcctgagacagtagcacaaaggctttccgttaaagaagaaattatggatgaagggcagggataagagctttatgaaagaaagaggtttgttaatcgttctctccggcccttccggcgtcggaaaaggaacagtcaggcaggcgctgtttgctcaggaggacacaaaatttgaatattcgatttcggtgacgacaagaaaaccgcgtcaaggcgaaagagacggcgtcgactacttttttaagacgcgcgaagagttcgaagagatgatcgagaacaacaagctgctcgaatgggccgaatatgtcggcaactattacggaacacccgttgactacgtcgaacagacgcttgaaagcggaagggacgtttttcttgaaatcgaagtccagggtgcgctgcaagtcagaaaggcatttcctgaaggcttgtttatctttttggcgcctccgagcctcgccgaattgaaaaaccggattgtcacaagagggacagaaacagaagccctgatcgaaaaccggatgaaagcggcgaaggaagaaatcgaactgatggacgcctatgactatgttgtcgaaaatgacagcattgagcttgcgtgcgaaagaatcaaagcaatcgttctcgccgaacatttacggcgcgaccgagttgctccaagatataagaaaatgctggaggttgaataaatatgctagatccgtcaattgactctttaatgaacaaactggattcaaaatacacgctcgttaccgtatccgcacggcgcgcccgcgaaatgcagatgaacaaagacgcgcagatcgaaaatccgaagtcgcataaatttgtaggcaaagcattggaagaaattgatgccggactgcttacattcgaaaaggaaaatcgctaatagccttaaaaatagcaacctatacactaggttgttatttttttcagggctggcgaacagaacataagggggagaaatacgatgctgaaaaatcgcaacatcctgctgggagtaagcggaggaatcgcggtatacaaagcggccgccttaacgagcaagctcgtgcaggcaggagccaatgtgaaagtcatcatgacaaaatccgcctgtgaatttgtgtctccgctcacctttcaggcgctttcgcgcaatgaagtatataccaatacgttcgaagaaccgaatccccgtgtcatcgcccatatcgatgccgcagattgggcggatctcgtgatcgttgctccggctacggccaatgtgatcggaaaactcgcctcaggcatcgctgacgacatgctgacgacgacgcttttggcgacgacagcgccggtgtggatcgctccggcgatgaacgttcatatgtacgaccacccggccgttcagcggaacatcagcgttctttacaaagacggctaccggtttatcgaaccgagtgaaggctaccttgcgtgcggctatatcggcaaaggcagactggaagagcctgagcggatcgtccagttggcagagtcgtatttttcaagcgaaaaaagcggtttgcttgaaggaaagcgcgtcgtaattacagcggggccgacaagagaacaagtcgatcccgtccgctttttctccaaccgttcgacagggaaaatgggctatgctttcgctgaggaagcggcacgaatgggagcgcacgtgacgctgattgcaggcccgacatcgcttgatgatcccgcaggggtcgacgtgattcatgttcagtccgcagaagatatgtatcaagcggctctgtctgttttcgatgagagcgacatcgtcattaaaacagcagctgtcgctgattacaggccaaaacatgtccacgatcaaaaaatgaagaaaaaggacggcggcctcgtcattgagcttgaacggacgaaggatattttaaaagcgctgggagagcggaaaacaaagcaaatcttggtcggctttgcagccgaaacgcagcacgtcgaagactatgccaaacaaaagctggagacgaaaaatctcgatatgattgtcgctaacaatatcacggctgaaggcgccggttttggaacggaaaccaacatcgtgacggtgtttcatcgagacggcaaaaagacggcgcatcctctaatgtcaaagcgggaggttgccgccgcagtcttgaaggaagccgctgagcttgccggatggagcgggacgtcttcatgaacttcgctgaagtgatcgtcgatgttacaacgaaaaatatcgacagaccgtttgattaccgcatccccgacaaattcaaaggtatgattaaaaaagggatgcgcgtgatcgttccgttcggcgcccgcaaaatccagggatttgtcaccagcgtgaaagaatcgtcggagcttgccggccgttcggttaaggatatcgaggatatccttgatctggcgcccgttttgacggaggagctgcttgagctgtcagactggctgacagaaaaaacactttcttttaaaattacggctttgcaggcgatgctccccgcggctatgaaagcaaaatacggcaaagaaatcaaggtgatcggcgataaaccgcttcccgaaccgctaaaaaccttgttctcgcaaaaagagacgctttcttattccgatataaatgaccacggaacattaaagctgattcagcgccaggttcaagaaggcaatcttgaagtggcgtataaagtaaagcagaaaacaaacaaaaaaatgcggagaatgatcgcccccctttgcgcgaaagaacatttaaaagaagcgcttgccggcctctctccgcaagctgtcaaacaaaaagcgatccttcagtttttcatcgaccgcaaagagggcggcgctgttccggcaaaggatctgatcgacaaaacggggggctcttccgcgtccttgaaagcgctcatcgacaaggggctgttaaaggaaagcgaagaggaggtttacagggatccttatcaggacagaatgttcaaaaaaaccgaaccgcttccgctgactgaagagcaggcgcaggcctacgaggcgatagcggatgcaatcgaagaaaagcggcacgatgtgtttcttcttcacggagtgaccggaagcggaaaaacggaagtctatctgcaatcgatcgaaaaggtgctggaagccggcaaagaagcgatcgttctcgttccggaaatttccctgacgccgcagatggtcaaccgctttaaagggcgctttggctcgcaggtagccgtactgcacagcgggctttcaacaggagaaaaatatgatgaatggcggaaaatccaccgcaaagaagtccggcttgtcgtcggggcgcgctcggcgattttcgcgccgtttgaaaatctcggcatgattataattgatgaagagcacgaaacatcgtacaagcaggaggagatgccgagataccatgcgaaagaagcggcgattcaaagggccaaataccaccggtgtccggtcgtgctcggcagtgcgacgccgacgctcgaatcgttcgcgagggcgaaaaaaggcgtgtacaagcttctttctctcaagcaccgcgtcaatcaccaagtcatgcccgacgtgtctctcgtcgatatgagagaggaactgcgcagcggaaaccgctcgatgttttccaaagacttaatggccgggcttgaggaaactcttgaaaaaggagagcaggccgttctgtttttaaacaaaagaggctattcctcatttgtcatgtgcagggactgcggatatgtcatccagtgtcctcattgtgaaatttcattgacgtaccacaggtatggacagcgtctgaagtgccattactgcggctatgaaaccggcatgccgtcaagctgccccgaatgcggaagcgagcatatccgctactttggtacaggcacacagcgggtcgaagaagaattgacgaaggttctgccggctgcaagggtgatccgcatggatgtcgatacaacctcaagaaagggagcgcatgaaaagctgctcacatcctttggcagaggcgaagccgatatcctgcttggaacgcagatgatcgccaaagggctcgatttcgaaaacgtcacgctcgtcggtgtcttgagcgcggatacgatgcttcacatccccgatttcagagccgctgaaaaaacgttccagctgatgacgcaggtgagcggaagagcggggcgccacgaaaagccgggcaaggtgatcattcagacgtacacaccgtcccattacagcattcagctcacaaaaacgcatgattatgaaacattcttccggcaggagatgctgcacagaagggaacaggcctatcctccatattattatttggcgctggtcagcgtatcgcacgaggaagtgacgaaggcggcactcgtgactgaaaaaatcgccacctatttaaaaaagaacatttcaagcgaggcgaagattctcggccctgtcgcatctccgatcgccaggatcaaagatagatatcgctatcaatgcgtgataaaatacaaacaggaaaaccagcttacatcgttgcttaaaaacattatggatcattacaaacgagacattgaacaaaagcaattggcgatttcgatcgacatgaatccatatatgatgatgtaaaaataacagtgtgatggagggcttttagattggcagtaaaaccgatcgtaacgtatccggcggaggttcttgagacccctgccgaacccgttgcgtcttttgataaatcattaaagaaactactcgacaatatgtatgatacgatgcttgagctggacggagtcggactggccgctccgcaaatcggcgtttcaaaaagagcggcagtcgtcgatatcggcgatgacacgggaagaattgaactggtcaacccggaggtcatcgaagagagcggtgaacaaacgggtcctgaaggctgtttgagctttcctgatctatacggtgaagtgaagcgttccgattatgtaaaggtcaaggcgttcgaccgccgcgggaaaccgtttacgattgaagctgagggctttttggcgcgtgcgctgctgcacgaaatcgaccatttggacggtattttattcacatcaaaagtaacgcgctattatgatgcggaagaacttgaggaaatggaaggatgattggatgacaaggatcgtttttatgggaacgccggatttttccgtcccggtgctcggcacattgattgatgacggctatgaggtagtgggtgtcgtcacccagcctgaccgcccgaaaggcagaaaaaaggtgatgactccgccgcctgtcaaggaggaagcgctgcgccgcggcattcccgtgctccagcctgagaaagtgagggaagaagcggaaacggacaagattttggcgcttgaacccgatttaatcgtaacggcggcattcggacagatcctgccgaaaaagctcctcgattatccgaaatacggctgtatcaatgtccatgcctctcttctgccggagctgcgcggaggagccccgatccattacgccattctggaaggcaaagagaaaacaggcgtgacgatcatgtacatggtcgaaaaattggatgcaggcgatatgctcgccaaggttgaagttgacatcgaagaaacagataatgtcggcacgctccacgataagctgagcaaggccggagctgcgcttctttccgaaacggttccgagaatcattgacggttcggtaaccccggaaaaacaggatgaacagaaagcgacatacgcgccgaacattaaacgcgagcaggaactgatcgactggtctaagcccggcgaagtcctgtacaaccaagtcagaggcttgaatccttggcctgtcgcatacacggtcttaaacggccagacgctgaaagtatgggccgcgaaaaaatgccaagccttaaaacaggcagagccgggggagatcgtcaccgttgaaaaagacggcattgtcgtcgcaaccggaaatgacaccgcgttaaaattaacggaagtgcagcctgccggcaaaaaaagaatgaaggctgaagattttgtcaggggagcgggtcttcaagccggaatgaaattgggtcatgacgatgaaaaataatgtgagagaagtcgcgcttgatgcactgattaagcttgaccagaatcaggcatacagcaatcttttgcttcagtctgccatgaaagcgaacgatttaagcgacaaagacagaggccttttgacagaactcgtttacggcacccttcagaataagctggcgcttgattatatgctgaagccgtttattaaaaagccggaaaaggtgaaagactgggtcatccatctgttgagaatgtcgctgtatcagatggaatacctggagaaaatccctgaccgggccgctctttttgaagccgttgaaatcgctaaaagacgcgggcataaaggaatatcttcatttgttaacggtgttctgcgctccgttcagagggaaggagtgccttcctttgcggatattgccgatccgattgaacgccttgcggttgagacaagccatccggagtggcttgtcagagaatggacggatgcctacgggttcgaagcggcagaacaaatctgccggattcatatgatcccgccgaagcagacgatccgcgtcaacaggctgaaaaacgaccgggatacgcttctttcccgtctgaatgaagcggggattgaggcggaagaaggcgacttgtccaaagacgctgtcaaactgctgaaaggaacgattgcgtccactccttttttcaaagaaggcgaagtcaccatacaagatgaaagctcaatgctagtagcgagagcccttggacctgagcggggagaaacagtgctggatgcatgcgcagctccgggaggaaaatccactcatatcggcgaactgctcgaagatacgggaaaggtcgtctccctggaccttcatcagcataaagtaaagctgatcaaagaagcggcaggccggattggactttccaacattgaagcaagagcgctggatgccagaaaagccggagaagtcttcgaaccggaacagttcgaccggatcctcgtcgatgccccgtgttcgggcttcggcgtcatccgcagaaaaccggatctcaaatacagcaaaacgcccgaagacagcgcgcgtctcgccgggattcagcttgcgattttaaacgaaatcgcacctttattgaaaacaggcgggacattggtttacagcacatgcacaatggacccgaccgaaaatgaacaagtcatgcatgcttttttggaagaacacgacgaatttgaagcggaccccaccctcgccgagcggctgcccgaaaaagcggcgccgtatgtcaaggatggaagcattcaaatccttccccactactttggaacggacggcttctttatttgcagcatgagaaagaagggatcacaataatggaatcgaaacaaaaagtaagaaaagaattgcggacagaaagaccgtccatctattcttttgaaatagaagaactgaaaagctggctatcggaaaacggcgagaagccattccgcgccgcgcaaatattcgaatggctatacgaaaagagagtcacgtcatttgaaaagatgacaaacctttcaaaagagctgcggacaaagctgaatgagcatttcgtattaacgacgctgaaaacggccgtcaaacagacttcccaagatggaacaatgaagtttttattcgagcttcatgacggctacacgatcgagaccgtattaatgcggcacgaatatggcaattctgtttgtgtaacgacacaggtgggctgccggatcggctgtacgttctgcgcatcgaccctcggcggcttaaagcggaacctggaagccggagagatcgtcgcacaggttgtcaaagtgcagcaggcgcttgatgaaacagatgaacgcgtcagctcaatcgtcattatgggaatcggcgagccgttcgataattttcaggaaatgcttgcgttcttgaaaatcgtcaaccatgataaaggactgaatatcggagcgcgccatatcaccgtatcaacgagcgggatcattccgaaaatctacgagtttgcagacgaaaagctgcagatcaactttgcgatttctctgcacgcgccgaacactgagatcagaagccggctgatgccgatcaacagagcctacaagctgcccgatctgatgaaagcggtcgattactacattaagaaaaccggcagaagggttacgtttgaatacgggcttttcggcggtgtcaacgatcaggttgaacacgcggaagagctggctgaattgctaaaaggaatcaaatgccacgtcaacttgattccggtcaactatgtacctgaacgagactatgtcagaacaccgaaagaacagattttcgcctttgaaaaaacattaaagtctcatggagtaaatgtcacgatcagaagagagcaaggccatgatattgacgctgcctgcggacagcttcgtgcaaaggagcgccaggaagagacgaggtgaatcaaggttgaaaacagccttaaaaacggacaggggaaaaatacgccagcacaatgaagacgatgccggcattttcacagaaaaaaatggactggtattagctgttgtctgcgatggaatgggaggtcatctggccggcgatgtcgccagcaggatggccgtctcagcccttcgtgatatttgggaggaaaccgaagaagtcccggcttcgccggctgaaagcgaagcgtggctgaaagagcagatttcagccgtcaaccaaaaacttttcgaccattcgagggcccacgaagagtgccagggaatggggacaacggtcgtctgcgctttatacacgggaaaaacgctgacggtcgcccatatcggagacagccgctgctatctcctgcaaggcggaagtttcatacagctgacggaagatcactcgcttgtcaatgaactcgtgcggactggggggatttcgaaggaggatgctgaacaccatccgcggaaaaacgtgctcacaaaagctctcggcacagatcccgaagtgaaggtagaagcccacacatttgaaatcgaaccgggtgatcaagtgctattatgttctgacgggctgacgaataaagtggatgatgagacactgaaggatatgctcacgactctttcttctgcggaggagaaagcggatcagctcgttcagctggccaatgacaacggcggcgaagacaatatcaccgtcgcgctattggaacttccttctcaaattgaagaaggtgaagacaagtgttaatcggcagacggatcagcggacgttacgaaatcctgcgcgccatcggcggcggggggatggcgaacgtttatttagcgctggacatcatcctcgaccgtgaagtcgcgattaaagtgctgcggtttgacttcgttcacgatgccgattttatcaggcggttcagacgggaagcgcagtccgctgcaagcctcgaccacccgaatatcgtcagcatttatgatgtcggagaagaagatgacatctattatatcgtgatggagtatgtcgaggggatgaccctgaaagaatacataaatcgaacaggcccacttcatccgaaagaagcggtccaaatcatggagcagatcgtatccgccatcgcacatgcccatgataaccagattgtccaccgggatattaagccccacaacattttgatcgaccatatgggccacattaaagtgactgatttcggcatcgccatggcgctcagctcgacgaccatcacgcacaccaactcggttttgggctctgtccattatttgtcgcccgaacaggcgagaggcggattatcgacgaaaaaatccgatatctactcgctcggcatcgtgcttttcgagctgctgacggcgcgtatgccgtttgaaggagaatcggcggtcagcatcgcgctgaaacatctccaatcagaaacgccgtcggtgaaaagatggaacccggccgtgccgcaaagcatagaaaacgtcgtcctgaaagcgatggcaaaagatccattccatcgctatgaagcggccgaagagatggaaaacgatttgaaaacggctttcgacccggaccggctcaacgaaaagcgcttcacgattccatccgatgatgagatgacgaaagcagttccgatcatcaagaatctgccggaaaacgggagcagctcgcaatccggcggcggagaagaggaagcggctccattatcaaaaaaagaaaagaagaagcaggcaaaagcaaacaagaagaaaaaaagaaagaaatggccgcttatattgctgacggtgtttttcgttctggctgcgtcagccgtcttggctttaacggtgtttccgtcgctctttattccgaaagatgtggccgttcccgatgttgccggccttgaatatgaagaagccgtcatcaagcttgaagacgaaggatttgaagttgatccgaatgctgaagacattgccgacgataaaattgaagaagggctgatcgtgaagacggaccctgcagccggcgatatcgtgaaggaaggttcaactgtcaagctatataaaagctcaggcaaagagaaaactgaagtcgatgatgtggtcggccagaaagtcgatgccgccaagaagcttcttgagcaaaaaggctttaaaaacatcaagacagaagaagtgcacgatgaagaagaagcgggaaccatcatcgaacaggaccctgcagccggaaccgaaatcgttgccgccgacgacgaggtcaaattaacggtcagcctcggtccggaagccattactttaagggatttaaaaacatacagcaaacaggcggcttcgggctatttggacgaccatcagcttgtccttgtcgaaaaggaggcgcattctgaagacgtgccggaaggtcaggtcattaaacaaaagccggaggcgggggcatcagtcaagccgggagacaaagtcgaggtcacgttttcgctcggacctaaacaaaagcccgtcaaaacggtgaccgagaaaattgatattccttatgaaccgggagcggcgggcgaagaacaaaacgtccaaatttcgatcgatgatgaagaacacagcatttctgacgtctacgaaaatttcaaaatcacagcgccggcagagcggacgatcaaattcaggattgcgcccggccaaaaagggtattatcaagtaacgatcaacgataaagtagtcaggtcaaaaacgattgaatatcctgaggatgaataagggaggtgcgatatgcctgagggcaaaatcattaaagcattaagtggattttactatgtattggatggcgatcaggtcattcagtgcagaggaagaggggtttttagaaaaaataaagtaacccctctcgtcggcgacgatgttgtctaccaagccgataacgataaggaaggctacattctcgagattaaagacagattcaatgaattggtcagacctccgatcagcaacgtggatcaggcggttctcgtgttttcggcaaaggagccgacattcagcacgtcgcttttggatcgttttttagtgctggttgaggcgggtgatattaggccgatcatatgcatcacgaaaatggaccttgtggatgatgacgcgctgaaagagcagattcatcaatatgccgaagactaccggaacatcgggtacagcgtctatttgacatcaatgaaaagcggaagaggcatcgaagacatcatcccccattttcaggataaaatcaccgtattcgccggccagtccggcgtgggcaagtcttcgcttttaaatgcgatcagccctgaccttgaactgaaaaccgccgggatttccgcccacttgggaaggggaaaacatacgacgcgccatgtggagctgatcgatataaacggcgggctcgtcgcggacaccccgggcttcagctcgcttgagtttgccggtattgaagctgaagatttagggcagacatttttggaaatcggcgaaaagagcgccgaatgcaagttccgcggatgcctgcatataaaagaaccgaactgcgccgtcaaacgcgccgtggaaaacggtgaaatcgcccagtatcgctacaaccattatgttgaatttttaacagagatcaaagatagaaagccgaggtattaagatatggtatatgttgctccttctattctttcagccgattttgcccgtctaggggaggaaattcgagatgttgaacaaggcggcgccgatttcatccacatcgatgtgatggacggccatttcgttcccaacctgaccatcgggccgcttgtagtggaagccgtccgcccgatcactgagcttccgctcgacgttcatttaatgatcgaagcgcctgaccgctatatacctgcttttgcaaaagcgggcgccgatattttgtccgtccatgttgaagcatgcccgcaccttcacaggacgatccagctcatcaaagagcaaggggtcaaagcgggagtcgtcttgaatccgcatacccctgtgcagcagatcgagcatgtgcttgaagaccttgatctcgtattattgatgacggtgaatccgggcttcggcggacagtcgtttatttcctcggtcctgccgaaaatcaggcaggtcaaggagatggctgagcaaaaaggacttgccgatctgctgattgaagtggacggtggcgtcaacaaaaatacggcaagacagtgtattgaagcgggagcgaacctgcttgtcgcaggatctgccgtttataacgaaaaagaccgcaaaaaagccatttccgatataaaaggtgcgcttgggtaaggtttcctgatgaaagagagccggctttctgcagctgcgctctttttttagggcgttcacagaaaggataatgcgatgaaaacgatcaatattgtagcgggaggccccgatcatcttattcccgacttgctgcagtatcaggccggggatgcgctttgggtcggggttgacagaggcgctgtcacccttttggatgcggggatcgtgcctgatgaagcattcggggattttgacagcatcacagacgagcaaaaaaaagcgattgaaaaggccgctccccgcctccatatttatcaggcggaaaaagatcagacggatttggaccttgcgttgagctgggctgtcggacagcgtccttcatttattagaatgttcggcatttcgggaggcagagcagaccattttctcgggaatctgcaccttctttataccgcgatgaagcaaaacgtcaagaccgtcatgatcgaccgccaaaatacgatcagcatgcatcccccaggctcctataccgtcatgcatgatcaaacaaaaccgtatatttcattcctgccgtttgcggagacggtaaaaaacctttctctcgaaggatttaagtattctttaaataagtgtcatattgctctcggttcgacactatgtattagtaacgaactcatccattcacaaggtgctttttcgttttcagaaggcatattaataatgataagaagcactgattaaatatcctggcgcttccgctcgctttgtgtttgggatccgatgttgaaggtggatgcggttgcggactctttgaggagggaagggaatgaaattttacaccatcaaattaccgaagtttttagggggaatcgtccgggcgatgcttggctcgtttcgcaaagactaagaagcgccgggtgcgctttttttgcggagcggcccggatggcaaaagaacgaaaaaacgcctgcctaaagcgtacagtcgctcttggcaggcgtttattttttcttatacacgctcaacttttccagatttcaaagctcgagcagatacatatacttttttaggcttgccgttcacaaggatgcgcactttttgaacgttagcgccccatgtgcgtttagaagcgttcatcgcgtgagaacgagagttgccagaacgtgattttctgcctgtaataacgcatttacgtgccatttgtttccctcctaactatcaaaaaaaacatcatcattctttatcagttgatcacctgtgatgcttcagatactttaataatttaccacagctgaaaaccgtttgcaactattgattgctctgctttcaagaaaaattccttgacatcttgaaaaaatgaacgcgctgtagtataagtagggttaggtttggagagaagcctgcctgttcttttaaaaagaaggtccttatagtagaatgatttataaccagaggtcaaaagcgagactcgaaaaggaggaaccaacgtgtccattgaattccgaacaaaatacggacagattgatatatcaaacgaagtggtcgccatggttgcaggaggcgcagcgatcgactgctacgggatcgtaggtatggcatccaagaaccaaattaaagacggactgactgaaatcctcagaaaagaaaactttgcaagaggcgtcatcgtccgccaggaagaggatcgtattcatattgacatgtacatcattgtcagctacggaacaaaaatttcagaagtggcacataatgttcaaacaaaagtcaaatatacgctcgaccatacagtgggtcttgcagtggattccgtaaatatttacgttcaaggagtacgagtgacgaacccgtagttaggaggaaaacaagagtgtctatacgaaatctggatggaaaagcttttgcagatatgattctgtacggcgcacaccatctgtctcaaaacgcaaatgtagttgatgcgttaaacgtatttccggttccggacggagatacgggaacgaacatgaatctgtcgatgacatccggtgcgaaagaagtggagcaaatcgacaccgccaatatcggcaaagtggcacaaagcctgtcaagggggcttctgatgggggcgcggggaaactcgggcgtcattttatcccagctgttcagaggctttggcaaatcgattgaacagaaatcggaaattaacgcgaaagaatttgccgccgcgttccaggccggagtggacaccgcctacaaggccgtcatgaaaccggtcgaaggcacgatcttgacggttgccaaagatgccgcaaaaaaagcagtgctcgccgctcaaactgaaaccaatatcatcaaggtgatggaagctgtcgtaaatgaagcggaggcttctttggagcggacgcctgagctgcttccggttttaaaggaagtcggtgtcgtcgacagcggcggaaaagggcttctttacgtgtatgaagggtttctcgcttctttaaagggagaaaagctttctgataaagcggcagctcttccgtcattggatgaccttgtcagcgccgagcaccataaaaacgctcaaagccacatgaatactgaagacatcgaattcggctactgcacggagtttatggtaaagctcgacagcggcaaaagaaactttaatgaagatgcgttccgccaggatttaagccgcttcggtgattcgcttctcgtcgtctcagacgaaaatatcgccaaggtgcacatccatgccgaatatccaggggaagtcatgacttacgcgcaaaaatacggcagcttaatcaacatgaaaatcgaaaatatgagagaacagcacagcgcgattctcagccagaacaaacaggagacagcaccggcagaaaaagcgccggcagataaacagccgtacggcatcgtcacagtggccatgggtgaagggattgccgagcttttcgaaagcatcggcgccacaaaggtcatagaaggcggccagacgatgaatccgagcacggaagacatcgttcaggcgataaaagacgccaatgcggacacggtcgtgattctgccgaataattcaaacattgtcatggcggcgaaccaggccgcggatgttgccggacaacatgtaattgtcatcccgacgaagaccgttcctcaaggaatggccgcactgctcgcattcaacccggccctttcagcggacgagaatgaagccgctatgctcggtgcgatcggcgaggtgaaaagcggacagatcacctatgcggtcagagacacaaacattgacggcatcgatattaaaaaaggcgattttatgggcatattaaacgggaaaatcgttgagacggcgtcagaccagttaacagcagcgaaaaagctgatcgcaggcatgatcgatgaagacagcgaaatcgtcaccgtgatcaaaggggaagacgccccggaagaagaggccgaagaactcgcagcctacatcagcgagacgtacgaagacgtcgaagtagaagtgcacgacggaaaacagccgctgtattcctacattctggctgtcgaataacgaatcaaaggcagaagggcatgttgataaaagcccttctcttcttttggctttttttaaagcctcagcccgcaacggacgttgtctgcttgccaattgggaaatgatcgattagtctaaaaaaaaacggctttttttcctccgtacagcgggggaatctgtttgtaaaagggggataaggatgaagtacagaagtgtgtttgatattatcgggcccgtcatgatcggaccgtcaagttctcatacggccggcgcggccagaatcggcagagtcgccagaagcgtgtttgggagggagccgaaacaaattattgtatcgctctacggttcttttgccgaaacgtataaaggacatggaacagatgttgcgatcatcggcggccttttggattttgatacatttgatgaaagaatcaaagattcgatccgtctagccgaagaaaagggaatcgccatcgagttccgggaagaagaagcggtaccgaagcatcccaatacagcccgcatcctcatctctgatgatgaaggctcccttgaactcgcaggcatctcaatcggcggagggaaaatcgagatcattgagctgaacggcttcgaactcagattatcgggtaatcaccccgctattttagtcgtccataacgaccgctacggaacgattgcaggcgtagccaatgtgcttgcgaagttcgcaatcaacatcggccatatggaagttgcccgcaaagacgtcggccaggaagcgctcatgacgattgaggtcgatcaaacgattgatccggctgtttttgatgaattgagagcgctgccgaacatcattgaggtgacccagatcgctgactaaaaaggagggtgagacgatatgtttcgaaatgtgaaagaattaattcaactgacaaaggaaaagaacgtgtccatctctgaaatcatgatcacacaggagatcgaggtgacaggccggacgcgggaagatatattcaagcagatggaagccaacttggctgtcatggaagacgctgttcaaaaaggcattgagggcgtcgtatcgcactccggattgacgggcggagacgccgttaagcttcaggcctaccttaaatcgggcaaagggctgtcaggggatgtcatccttgacgctgtcagcaaagcggtagcgacaaatgaagtcaacgctgcgatgggaacgatttgcgcaacgccgacagccggatcggccggcgttgtcccggggacgctctttgcggtaaaagagaaacttcacccgacgaaagagcagatggtccgctttttatttacatcgggagcgttcggattcgtcgttgccaacaatgcgagcatttcgggagccgccggaggctgtcaggctgaagtcggatcggcctcgggcatggcggctgccgccatcgtcgaaatggcgggcggaacccctgaacagtgcgccgaagcgatggccatcgctttaaaaaacgtactcggtctagtctgcgatcctgtcgcagggctcgttgaggtgccgtgtgtgaagcggaacgcgatgggcgcagccaatgcgatggtcgcggctgatatggcgcttgccggcattacaagccgcattccatgcgatgaagtgatcgatgcgatgtacaaaatcggacagacgatgccgacggcactgagggaaacaggccggggcggtcttgccgcaacaccgacgggcaaagaattggagaaaaaaatattcggaggagcgtcagctgcacgtggaacacaatctgcaacttagtatatctgttataaaaggcgtcgggacggaaacggaaaaaacgttgaacgagctcggaatctatacggttctcgatcttttaaactacttcccgtaccgatatgacgattatgaattgcgcgatttggaagatgtggcacacgatgaacgagtgacggtggaagggaaggttcacagcgagccttctcttgcctattacgggaaaaagcggagccgtctcacgttccggcttttggtcgggaactatttgatcacagcggtttgctttaacaggccttatttgaaaaaaaagcttgcgatcggctcgattgttaccgtaaccggaaaatgggacaagcacagacaatccgtgatggtgcaagagctgaaaaacgggccgcaccagggtgatcagtcgattgaacccgtatactccgtcaaagaaaacatcaccgtaaagacgatgaggaaattgattcaggaagctgtccgcagccatttgccgtttgccgaagatcctcttccggaaaagcttcggaccgcctacaaacttctgtcttaccaggaggcggtaaaggcgatgcacaagcccgagtcgagggaagctttaaagcatgcgcggcgccgttttgtatatgaggaatttttgctgtttcagctgaaaatgcaggctttgcgaaagttcgagcgggaagcgtccgacggaatcagccacacctttcggctcgaagacgtcaattcgtttgtcaaaagccttccgtttcctttgacaaacgcgcaggcgaaagcgctcgacgacatattaagggacatggcttcagggtataaaatgaatcggcttttgcaaggagacgtcggttcaggcaaaacagccgtcgccgcgattgcgctatacgcctcgctgctttccggattccagggggcgatgatggttccgaccgaaatactggcggaacagcacgccgattcgcttgtatccctctttgagcagcacgacgtcaatgtggcgcttttaacaagctctgtgaaagggaaaaggagaagagagcttttagaaagattaaaagaaggagaaattgatattttggtggggacgcacgcccttattcaggacgatgtccactttaaacagctcgggctcgtgatcaccgatgaacagcaccgcttcggcgtcgagcaaagaaaaaaactgagaagcaaagggaaagatcccgatgtcttgtttatgacggcgacgccgattccgagaacactggcgatcacggttttcggggaaatggatgtgtccgtcatcgatgaaatgccggctgggcgaaagcggatcgagacgtattgggtaaagcacgacatgctcgaacggattctcgcgtttatcgataaagaactgaaaaaaggcagacaggcgtatgtgatctgtcccttgattgaagagtcggacaagctcgacgttcaaaatgcaattgatgtgcacagcatgctgactcatgccttcaggggaagatggcagatcggtctcatgcacggaaagctgtcaaatgacgagaaagaacaggtaatgaggcagttcagcaaaaacgaatgccagattctcgtttccacaaccgtcgttgaagtcggggtaaacgttccgaatgcgacggtcatgctgatctatgatgccgaccggttcggtctttcccagctgcatcagcttcgcggccgggtcggacggggcgatcaccagtcgtattgcatcctgatggcagacccgaaatctgagacgggaaaagagcgcatgagcatcatgtctgagacgacggacggctttgagctttctgaaaaagatcttgaactcagagggcccggggactttttcggcaagaaacagagcgggatgccggagtttaaagtcgccgacatggttcacgactaccgcgcgctggaaacggcaagaagagacgctgcagaacttgtctcttcaaaagcgttctggacggatgccgaatataaaagcctgcgggaacacttgcaaaacagcggggttatggacggagaaaagctgagctgatctgaagtccagctaaaatttatcgtcggcgggtaaagaaagattgcattccaatctatgaaattatatactactattagtacctagtcataattgcgcggatggtgtttaataacatgagaaaaagtaagagagaacgccaagaattgctgcagcagacgattcgtacgaccccgtttattacggacgaggagttagcggagaaatttaacgtcagcattcagacgattcgcttggaccgtttggaactttccatacctgaactgagagaaagaatcaaaagtgttgccgagaagtctcttgaagatgaagtcaagtcattgccgcttgacgaggtcatcggcgagatcattgatttggagctggatgagcacgcgatttcaattcttgagatcagaagggagcatgttttcagccgaaatcaaatcgccagggggcaccatttgtttgcccaggccaactcgctcgccgtcgccctcatcgacgatgagctcgcattgacggccaaagcggacatccgctttacaaggcaggtcaagcaaggcgaacgggtcgttgcaaaagcgaaagtcgtgaagcttgataaagataaaggcagaacggttgttgaagtgaacagctatgttgccgaagagcctgtgttttcaggcgaatttgtcatgtatcgttcaaaacaatcatagaaggtggcgcgtaagtcatgaaaattgctgtagatgccatgggaggagacaatgctcccaaagcggttattgaaggcgtgatgaaagcggtcgaagattttgaagacctcgagatcacgctgatcggcgaccgggaaaaaatagccgcccatttaacagaacacgggcggatcaccgtcaaacacgcggaagaagtcatcgaagcgacagacgagccagtcagagccgtcagaagaaagaagaattcatcgatggttctgatggccggagaagtcgccgaaggcagggctgatgcctgcatttccgccggaaacaccggagcgcttatgacggccgggctctttatcgtcggccggattgaagggattgaaaggcctgcgttggcaccgacattgccgaccgtctccggagacggctttctccttcttgatgtcggagcgaatgtggacgccaagcccgaacatctcgttcaatacgccattatgggatctgtttacggagaacaggtgctgggcgtcaaaaatccgcgcatcggacttttgaacgtcggaaccgaagataaaaaaggaaatgagcttgccaagcagacctttcaaaaattgaaggaaaccgatttgaatttcatcggcaatgtggaagcccgcgatatgctggacggagtcgctgatgtcatcgtcacagacggctttaccggtaacgttgccttgaaaacggtcgagggcgcggcgctgtccatttttaaaatgctgagaacgacgctgacttcgagcttcacggcgaagctcgccgcttctgcactgaagccgaagctgaaagaaatgaaaacgaaaatggattactctgaatacggcggagccggattgttcggcttaaaggcgcccgtcatcaaagcgcacggatcatctgacggacgcgccgtttatcacgcgatccgccaggccagagagatggtcagccaaaatgtcgcggcatttatcgaagaaaaaattcaacaaaaagcagatgaatagtctggaggttttaacacatgggcaagattgcttttctattcccgggccaaggttcgcagcatatcggcatgggacacgaattgtatgaaaaagaaccgaatgcgaagaagatttttgaagaagcggatcaaacgcttgaaacaaaactgagcaccctcatgtttgaaggggatgcaaaggaactgacgcttacatacaacgcgcagccaagccttttaacggcgagcatcgcagcgcttgaaaaactgaaggaatacggcattaaagccgactatgcggcaggtcacagcctcggcgaatacagcgcattggtcgctgccggcgccttgtcgtttaaagatgcggtttatgccgtcagaaagcgcggcgaattcatgaatgaagccgtgccggcgggagaaggcgcgatggcggccattctcggcatggacagccaggcgctgaaagaagtgacggacaaaatttccgaagaaggaaaccttgttcagctcgccaatttgaactgccctgggcaaatcgtcatctcgggaacagctaaaggcgtggagctcgcttcagagcttgcgaaagaaaagggcgcaaaacgcgcgattcctctcgaagtcagcgggccgttccattctgagctgatgaagccggcagctgataagcttcgtgaagttcttgatgcgtgcacgatcaacgacgcagccattccggtcgtctccaacgtaacggccgactttgtaacggataaagacgacattaagaataaactgattgaacagctgtattcccctgtacgctttgaagaaacaatcagccgcctgattgacgaaggcgtcacgaccttcattgaaatcggtcccggaaaggttttgtcagggcttgtgaagaaagtgaaccgcagagtcaaaacgattgctgtatcagacccgaacacaattgaacttgccgttcaaacgttgaaggaggaaaacgaaaatgctggaaaataaaacagccgttgtgacaggagcctcaagaggaatcggccgcgcgatcgccctggacctggcgaaaaacggagcaaatgtcgtcgtcaactacgcgggaaatgaagcgaaagcgaacgaagtcgtagacgaaatcaaagcgctcggccgcgatgcgtttgcttttaaagcggacgtttccaatgcggatgaggttcaggcgatgatgaaggaagcggtcggacgcttcggcacgcttgacatccttgtcaacaatgcgggcattactaaagacaatctgttcatgagaatgaaagaagatgaatgggacgacgtcattaacataaacttaaaaggtgtgttcaattgttcaaaagctgtgacaagacagatgatgaaacaaagaagcggccggatcatcaatatcacctcggttgtaggcgtcgtcggtaacgccgggcaggccaactatgtcgcggctaaatcaggcgtgatcggcttgacgaaaacgctggcaaaagaactggcgtcaagaaacatcactgtgaatgcgatcgctccgggattcatttcgacggaaatgacggacaagctgacaaaagacattcaagacgaaatgctgaagcagattccgcttgcgcggttcggcgagccgtctgacatcagcagcgccgttgttttcctcgcatctgaccatgcgagctacatgaccggccagacgctgaacatcaacggcggaatggctatggtttaaacgaaatcaaaaattgaattatctctggttttttaaaaacgaatcaactataatacttgaggggaggtgaatagctatggcagacgcattagagcgtgtaacaaaaatcatcgtagaccgcctcggcgtggatgaagctgacgtcactcttgaagcttcttttaaagaggatttaggcgctgattccctggatgtagttgagcttgtcatggaacttgaagacgagtttgatatggagatttctgacgaagatgctgaaaagattgcaacagtcggtgacgctgtgaactacataaatagtaagcagtaagctcatttaaagtcccgtttaaagacggggctttatccctttataaatgcggctttaattttaatgttttgcccaatgataaacgaacctgccttttcataggaggtgaggtgaacttgatgtgcccatatggaggttgctatgtcaaaacattcacatttcagagacaaaaaaatgtttcaaaaaaaagcggagcagtttaaaaagtttcaggaacggatttcggttcaatttcaaaacgagaagcttttatatcaagcgtttacacattcatcttatgtgaatgagcatcgaaagaagccatatgaagataatgagaggcttgaatttttaggagacgccgttttggaactgacgatttctcaatttttatacgccaaatacccggcgatgagcgagggtgatttgacgaaattgagagcggcgatcgtatgcgagccttctttggtttccctggcccatgagctttctttcggagagcttgttctattgggaaaaggagaggaaatgactggaggaagaaagcgtccggcgcttttagccgatgtgtttgaagcttttatcggtgcgctctatctggatcaggggctcgaagccgtcgtgacttttctgaaagcgtacgttttccctaaaatcgacgatggtgctttttctcatgtgatggattttaaaagccagctgcaggaatttgtacagcgcgacgggcgaggcatactggagtataaaatccttcaggaaaaaggaccggcgcacaaccgcgaatttgaagcaaatgtatcgctaaaaggagaagtacttggggtgggaagcggccgttccaaaaaagaagctgaacagcatgccgctcaagaagcgctcgcgaagctgcaaaaacaccatatgaaacaataaatcccccttgcaaaaaccagggggatttcaatgtattttgagccttttccatagggttatgatagaattgtaatactttaatacataaggaggatcaccatgttcctcaaacgtttagacgtgataggatttaaatcgtttgcagaacgaatttctgtagattttgtaaaaggcgtgacagccgtcgtcggcccgaacggcagcggaaaaagcaacatcaccgacgcgatccgctgggtgctcggtgaacagtccgccaaatcgctcaggggcggcaagatggaagatatcatttttgccggcagcgactcgcggaaaaagctgaaccttgccgaagtgacgctgacgcttgacaacgatgaccgctttttgccgatcgattttcacgaagtcagtgtgacgagaagagtctacagatcgggggaaagcgaatttctcatcaacaaccagccgtgccgcctgaaagatatcatcgatctttttatggattcagggcttggaaaagaagcgttttccatcatcagccaaggcaaagtcgaagagattttaagcagcaaggctgaagagcggagaagcatcttcgaagaagcggccggcgtattaaaatacaaaacgagaaagaaaaaagccgaaaacaagctgtttgagacacaggacaatttgaaccgggtcgaagacatcctccacgagctcgagggacaggtggagccgctgaaagtgcaggcatcgatcgccaaagactaccttgaaaagaaggatgagcttgaaaaaatcgaaatcgcgttaacggcgtatgacatcgaagagcttcacggaaaatgggaagcccttcagcaaaaagtcgaaaaggcgaaagacgaagaaatgtcctcttctgcggccatccaggcaaaagaagccaaaatcgaagaggcaagagacaaaattcaagcgctcgacgaatcggtcgatgagcttcagcaagtgctgcttttgacaagcgaggaactggagaagcttgaaggccggaaagaagtgctgaaggaacgcaaaaaaaacgccacgcaaaacagagctcagcttgaagaagcgatcgtccagcgcagtgaaaaagagcgaaccctgaaagagaaaatcgccgcgcagaagcttgtgtttgaaaagctcgagactgaagcaaaagagcttgcccgacaggtgaaagaaaaaaatcaggctttatccggatacagcgaaaatgtagaggaagaaatcgaacagctgaaaagcgattatttcgagctgttgaacgaacaggcttccgtccgcaacgagcttcaatttcttgaagaccaaatgacccaatctgcggcacagcagaaacggctcgcacaaaacaatgaaaaatatttaagcgagcggaaggaaatcgccgaccaaaagatgaaaaccgaacacgaattcagcctcgtggacgagcgtcttcacagccagattcaagcattcagggacgcgcaaaaaagctatgaacagaaaaaaagccagtacgaaaaaaaggaatccgccctttaccaggcttatcaatacgttcagcaggcgcgctctaaaaaggaaatgcttgaagcgatgcaggaggacttttcggggttttatcaaggcgtcaaagaagtattaaaggccaagagcgagcttccgggaattcgcggcgcgattgcagagctgttaaagacggacgagcggtatgaaacagcgatcgaaatcgcgctcggcgcaacagcacagcatgttgtcacagaagatgaagacgccgccagacgggcgattcaatatttgaaaaagcattcgttcggaagggcgaccttcctcccgctttccgtcatcaaagagcgccgcatccagccgagagacatcgagacggcgaaagaaaacccgtcgttcatcggcatcgccagcgagcttgtttcatttgatccggcctaccggagcgtcgtgcaaaatctgctcggcaccgtgctgatcaccgagcatttaaagggcgccaacgaccttgccaagcggctcggccacagataccggatcgtcacccttgaaggggatgtcgtcaatccgggcggttccatgacgggaggagctgtcaagaaaaaaagcagctcgcttctgggacgaaacagggaactggaagcccagacaaaacgcctcgccgagatggaagaaaaaaccgaattgctcgaaaaagaagtgaaagccctgaagcagaccattcaggagcttgatgccaagctacagtcacttcgggaggacggagaacgcctaagatccgagcagcaggaaatcaaaggccgtctgtacgaactcgaaatcgccgagaaaaacgtcaacagccatttggagctctatgaccaggaaaaatcggctctgcttgaaggggacgaagacaagaagtggcgtaaagaagagcttgaagaaaagctcgcatcgatcgccggcgagctgcagcgccttgattccgaaatcgaagccatgacggagcggaaacagacgcagacctcgacgaaagaagcgttgcaaagcgagctgaccgatttgaaagtggtgctggcgaaaaccgaacagtcgtgtgcaaacgaacgggaaaagctcgcaaggcttgaagaagagtatgccgagaatgcggaagcgctcaaggtggccgaagaggatctttctttcttaacgacagagatgtcctccaattcttccggtgaggaaaaacttgaagaagctgcgaaaaagaagctgaacgataaaaataaaaccgcagagctcatcgcctcaagaagagaacagcggatgaagctgcaaaaaggccttgaaaccgaagagctcgaactgaaagaaatgaagcgccagtataagcagatggccggtctcttaaaagatgaagaagtcaagctcggccgcatggaagtcgagctcgacaacctgctctctttcctgcgggaagagtacggcctttcatttgaaggggcaagggaaaaatatcctttggagctttcccctgaagaagcgaggaagcgcgtcaagctgatcaagcttgcgatcgaagagctgggaacggtgaaccttggcagcattgaggaattcgaaagggtcaatgaacgctacctcttcctttcagagcagaaagacgacctgctcgaagcgaaaaatacgctctttaaggtcatcgaggaaatggatgaggaaatgacgaagcgttttgcggaaacatttgcgcagatcagctcccattttgaagacgtcttccgggcgctgttcggcggcggaagagccgagctcaagctgacagatccgaatgacctgctccaatcgggcgtcgatattatcgcccagcctccgggcaaaaagctgcagaacctgagcctgctttccggcggggaacgggccttgacggcgatcgcgctcctgttttcgatcctcaaagtcagaccggttccgttctgcgtgctggatgaagtcgaggcggcccttgatgaagcgaacgtgttccgctttgcccaatacttgaaaaaatacagccatgaaacccagttcatcgtcatcacccaccggaaaggaacaatggaagaagccgatgttctttacggcgtgacgatgcaggaatcaggcgtttccaagctggtctcagtcaagcttgaagaaacaaaagaattagttcaataaagcgaggttacaggacatgagcttttttaaaaaactgaaagaaaaaatcacacagcagaccgattcggtctcaggcaaatttaaagaaggcctggcgaaaacgagaaatacgtttcaggagcgggtcaatgagcttgtctcccgctaccggaaagtggacgaggatttttttgaagagcttgaagaggttctgatcggcgctgatgtcggcgttgcgactgttatggagctgattgacgagctgaagagcgaggtcaagcgaagaaatattcaggacccgaaagaggtgcagtccgtcatttctgaaaagctcgttgaaatctatgaaggcggggagcaggaagcatcagagctccgcgtcgaagacggccgcctaaacatcattttattcgtcggcgtcaacggcgtcggcaaaacgacgacgatcggcaagcttgcccatcaattcattaaagaaggcaaaaatgtcgttcttgctgccggagatacattcagggccggcgcgatcgaccagcttgaagtgtggggagagcgcgtcggcgcgcatgtcgtcaaacaggcggaaggctcggatcctgcggctgttatctatgacgccgttcaagccgcgaaagcgcgcggcgccgatgtcctgctttgcgacacggcaggacgcctgcaaaataaagtgaacttaatgaaagagctagaaaaggtaaagcgcgtgattcagcgcgaagtgcctgatgcgcctcatgaagtgctgctcgtactggatgcgacgacagggcagaacgcaatgacacaggcgcgcgaattttccaaagcgactgatgtctcaggcatcgtgctgacgaagctcgacggaacggcaaaaggcggcatcgtcctcgccatccgccatgagctgcagattccggtcaagtttgtcgggctgggggaaaaaatggatgacctgcagccgtttgaagcagagtcatatgtatacggcctgttttccgatctgatcgagaaagaagagtaggcgcggaaaacccctttgcgggggttttcttttttgccgtccggtatgacaagataaaaacttgacagatcaaatatttcagcgtaaactagtgtatcgtaaagggatttgacttaacaaaggggagagtctcatgacgcttgaaaaaacaacgagaatgaattacttattcgatttctatcagacgttgttgacatcaaaacaaaaaagctacatgtcgctttactacttagacgatttctcccttggcgaaatagctgaagaatatcatgtctcaaggcaggcggtctatgacaatatcaaacggaccgaagccatgcttgagcaatatgaagaaaagctacttttgtttaaaaaatttcaagagcgcaaaaagatttttgaagcgctgagaaagctgactgacggtcagcctgaggcggagtccctgattgatgcgcttgagaaattagattaggaggcggcacttaatatggcattcgaaggattagccgaccgactgcagcaaacgatctcaaaaatccgcggaaaaggaaaggtaacggagcaagacgtcaaagagatgatgcgcgaagtccgtttagcgctccttgaagcggacgtcaattttaaagtcgtgaaagattttgtgaaaaaggtaagcgaacgagctgtcggacaagacgttatgaaaagcctgacgcccggacagcaggtcattaaagtggtaaaagaagagctgacggagctgatgggcggcgaggaaagcaagattgccgctgcaaagcgtccgccgaccgtcatcatgatggtcggtctgcaaggggccggtaaaacgacgtcgaccggaaagcttgccaacctgcttcgcaaaaaacataaccgcaatccgctgctcgtggcagcagacatctaccgcccggcggcgatcaaacagctggaaacgctcggcaagcagctcgatatgccggtattttcactgggtgacaaggtcagtccggtggagattgccaagcaggccatcgaaaaggcgaaagaagatcatcacgactacgttctcatcgatacggcgggacgccttcatattgatgaagagctgatggatgagcttgagcaggtaaaagaaaccgctcagccggaagagattttccttgtcgttgactccatgacgggtcaagacgcggtcaatgttgccaaaagctttaacgaacagctcggtgtgacaggtgtcatcttgacgaagcttgacggcgatactagaggcggagcggccttgtcaatccgcgccgtgacaaacacgccgatcaaattcgccggaatgggcgaaaagcttgatgcgctggagccgtttcatcctgaacggatggcttcgcggatactcggaatgggcgatgtgctcacccttatcgagaaagcccaggccaacgtagacgaagaaaaggcgaaggaactcgagcaaaaaatgaaaaatatgagctttacgctcgacgactttttggaacagctcggacaggtccgcaatatggggccgcttgaagacctgattcaaatgatgcccggcgcaggcaaaatgaaaggcttaaaaaacgtgaaggttgatgaaaaacagctcagccatatcgaagcgatcatcaagtcgatgaccgggaaggaaaaagagcagcctgagatcatcaatgcaagcaggcgcaaacggattgctaaaggaagcgggacatccgtccaggaagtcaaccgtcttttaaagcaatttgaagaaatgaaaaaaatgatgaaacagatgacaaacatgacaaaaggcaagaaaaaagggtttaaactgcccttcatgtaaacctgttttcagatgataaaaacgttgttaagaaaaaacactttacaaacacttttatcattgttaatatactatcttgttgaaatattttcggaggtgctagtaaaatggcagtaaaaattcgtttaaaacgtatgggagctaaaaaatctcctttctatcgtattgttgtagcagattctcgttcaccgcgtgacggccgcttcatcgaaacagtcggaacttacaacccgcttgcaaaaccagcggaagtcaaaatcgacgaagagcttgcgcttaaatggcttcaaacaggagctaaaccgtctgacacggttcgcaacctgttctcaaaagaaggcattatggaaaaattccacaacgctaaacaaagcaaataatgagtgatctgcacttggaagagctgattgtatcactggtcaaaccgcttgtggatcacccggatgatgttcaggttttcaaagaggaaaatccagagcggattatgttccgcctgtctgtcaacagagaggataccggcaagatcatcggcaaaaaagggcgcactgcaagagcgatacgctctgtcgtatttgcggcaggcgcacagtcttctaagaaagttcaacttgagatcgcagactaaggggagagggtgaaaacctcccccttttttaacatgtaagaaaaatagaaacagatgaacgattccgatcgtcagcttatgccaggctgccggatttcagggaaaggaaaaatcacgggacagtaggtgatgatgccatgcaaattatccaacgtgttaccgtcatgcaggttttgactgaaaacagcaaaaaaaagctgctggcttcttttgaagaaagaaaggaaatccttgagcgcgaatgcaaccagctctattttcagctcaggaaacacgaaaaggaacaccacaatccggcggcgactgaatcatttaaaaaagaaattgaaaaacgacaggacaagattaaaatgatcgtttttcaaatcaatcaaatccacacactgccgcttggcagcgaagtaaaggaaaaagaaatcgacgctttaatggacattgaagtcggggataattggcatgatatgacggcgggaaaaacaatcgtgattaaagacgggatcgtcattgaaattcgtccgaggtgaagaaatgctgaaacaatggtttaatgtagggaaaattgttaatactcatggggtaaaaggcgaagtccgcgtcatttcaagaaccgattttcctgaggagcggtacaagcccggaaacgcgctctacttgtttctggaaggaaaagacgagcctgtccaggtgaccgtcagcgcccacaggcttcacaaacagttccaccttttgcagtttaaagaggttgaaacgctcaccgaagccgaaaaattaaagaatgccttgattaaagttcccgaagaccaattaagccagttggcggaagacgaatactactttcacgaaatcatcggctgcgatgttttctcggaagacggggatttaatcggcaaggtgaaagaaattttaacgccgggcgccaacgatgtctgggtcgtggccagaccgggaaagaaagacgcgctcatcccttatattgacgccgttgtcaaagagattaacgtagcggataaaacgatcaagattcatatcatggaaggattacttgacgaatgaaaatcgattttttaacgctttttccggaaatgtttgaaggcgtgctcggctcgtcgatcctgcaaaaagctcaggacaaggacgctgtccgttttcgcgtggtgaactttcgggcctattccgacaacaagcatcaaaccgttgacgattatccatacggcggcggagccggaatggtgctgaaaccgcagcccgtctttgacgcggtcgaaaagctgacggctgaagccggagggtctccgagaatcatcctcgtctgcccccagggtgaacgctatacccagcagaaggcggaagaactggcgcgggaagagcatttaatgttcatttgcggccattatgaagggtatgatgaacggatcagggagcacctgtctacagacgagatttcgatcggagatttcgttttgacagggggagagctgccggcgatgatgatcgcagacagcgttgtgcggcttttgccgggcgtgctcggcaaggaagaatcgcaccttgaagactctttcagcacagggcttcttgaacaccctcattacacgcggccggcagattataaaggcttgaaggtgccggacgttctgacatccgggaaccatgcgaagatcaaagaatggcggcggaaggagtctctcaggcgcacatttttaaggcgtcccgaccttctggaaaactatcctttgtcagaagaagagcgaaagtggatttctgaatggaaaaaccggtagattctattgcgcccgggaaaaaggtgtggtatgatactacttgtgacttgaacgggaacgctcgtttaagtttgaaaacgatgttccgctgtgccggttaactcgcgcaagagcatctgttggaaggagttgaagacgatgcaaaaattgattgaagaaatcacaaaagaacaattgcgcactgatttgcctgcgttccgtcctggtgatactttacgtgtacacgttaaagttgtcgagggtaaccgtgagcgtatccaggtttttgaaggtgtcgtgattaagcgtcgtggtggcggaatcagcgaaactttcacagttcgtaagatttcttacggtgtcggagttgagcgtacattcccattgcacacaccgaaaatcgcgaaaatcgaagttgtccgtcatggtaaagtacgccgtgcgaaactttattacttgcgcgaacttcgtggaaaagcggctcgtattaaagaaatcagacgataatgataacgaacgaaaagagcttgttaaccataacaagctctttttttgtcaaacaagtataaatgcatcgcaccattaaaagaatagcaataacagaaagtaggtggcagacaaatggtgatccaatggttccccgggcatatggccaaagcgaggcgggaagtaacggaaaaactcaagctgatcgacattgtatacgaactggtcgacgccagaattccgatgtcttcaagaaacccgatgatcgaagacattttaaagaacaagccgagaatcatgctgctcaacaaggcggataaagcggactcctccgtgacaaaggcttggaagcagcactttgaaaaagacggaattcctaccctcgccatcaactcggtcaacggacaggggctcaatcaaattcttcctgcatcaaaagagctgctgaaagaaaagtttgataaaatgaaagcaaaaggtgtaaagccgcgcgcgatcagagcattgatcgtcggtattccaaacgtcggcaaatcgaccttgatcaaccggcttgcgaaaaaaaacatcgccaaaacgggcgacagacccggagtaacgactgcacagcagtgggtgaaggtcggaaaagagctggagcttctcgatacaccggggattttatggccgaagtttgaggacgagcttgtcgggctgaggctcgcggcaacaggcgcaattaaagattcgattatcaacttgcaggatgtcgccgtctacggtttgcgctttttggaagagaattaccccgaacgcttaaaaaagcgctatgacctggaggagattcctgaagaaattgcagcgctttttgatgagatcggaaaaaaacgcggctgcctcatggccggaggcgagatcaattacgacaagacgacagaagtcatcatccgcgatatccgcaccgaaaagttcggcccgctttcttttgaaaagccggaggatatgtaaaaaggcgcgcttttaaaagagcgggcctttatttttgcagaagatgcgccgataagaacattaggggagaagagaaagtgaaaacattaaccgtcaaagaaattaaagaacatcttcaatcggtgagcgatgaaaaggacccttttatagagcagtgcaaaaatgatgagcgaaaaagcgttcaagcgctcgtcgacgcctggctgaagaaaaatgaaaggctttcggccatgcgggaagagtggcaggcgatgacgtcttttgaacggtcgctgagagcgcggggctatcaatatatcgccggaatcgacgaggcgggcagagggcctctcgcagggccggttgtcgccgccgctgtcatcctcaaagaagattgtgaaatattagggctgacagattcgaaaaaactgtcaaagcaaaaaagagaagactattattcatacataatggaagaagccgcagcagtcggcgtcgggatcgcggacgcccatgagatcgatgagctgaatatttatgaagcctccaaagcggcgatgctgaaagcggtccaagcgctggacgtcgcaccggattatcttctgatcgacgccatgtcgcttgcggtcgatacagagcagtcatcgattattaaaggggatgccaaaagcgcctcgatagcagcaggcgcatgcatcgcaaaggtgacgagggacaggctgatggatgaatacgctgaaaagtatcctctctacgggtttgaaaagcataaaggctacggaacgaaggagcatctgaatgccctggcgaaatacggcccgtcgccgatacaccgaagatcgttcgcccctgttaaagcacatgaataacgttccggaggaagaatgactttgatgatgctgaacgatgtacataacagcttaagaaaacaatttgaacaagcggattctctccagcggatcagcggaacggagacggatcagaaaaggctgatgctcggcaaagtgctccgctttatcagcgagcagttcgccgaaatacaaatcggcaatacgaaatggcaggggaagcttgaggcacccctgaaagcgggcgctcattactggttttcgtatgaaaagaagccggatgaagcgacaggccgccttcaggtcgttgaagcgtttgacaaaaacccgaagaccgtgcaggatgccgcctttaagctgttgaacgggctttctctgaagcggacgaaggaagccgtctttctggtcggagcgttgctgaaggagcagcagccgatcagggaaaacgatttaagagccgccatcaagtggcttgaaaatctgccgaagtccgatgcccaaaaaggcgccgatgccgtcatgttcgctcttaaacgcgaacttcccgtccaccccggcgtgctcgattcgattatggccgtcaaaagccccgttccgctcaatgagcagattgcgagaacgcttgatatgatcgcgaacgccgctcagccatccccaggcatggaaaagctgaaacaggcgcttttgccagttttacaagcggagactgaggtgcatgccgaaaggctgattcaaaagcttgcggaacacatcagatcgctggaaaaaggagaactgcaggccgttctgccattaaagccgcaggttcagtcagaaggcggaaaacctccgcaaaaagcagacgctggcggcgcatacggacaggaagcaaaagcagcccagcacaatccgcaaatcgcagcagctaaagacgtgttcgctaaattggcggcacaagccgaaacgaacgggacgcatattgcaagagaagcggcaggcgtcatcaaagcgcttgaatcgcgcggagctctcggacaagctccggccgttctggaaggattcacgccaaaagagacggaacttttgcagcatatcatgaaagaaacagcgcctgcattgacgaataaagccgatgtattatccgttctcctcaagatcaaagatgttttaggcgtcagagatgagctctcattgttgagagcgatggaaaacggcgccgttctcaaagagcagggcctgcaatctttaaagctcgtgctgaatgaaatgaggcatgcttccgatcttccggctcctgtaaaacaggaagcggaccaaatctttcaccgtttaaacggacagctgtttttgcagaatgatcagcctgcccagagccagctttttctgtcgtaccctctgttttcaaagaacggcgtccaggatttgaacgttttcttaaaagggcagaaaaaagacgacggaaaaatcgacccttcccagtgccgcctcatgttttaccttcagttggaagcccttgaagagacggtgatcgattgtttgatccagcaaaacgtcatgacggttacaattgaaacaaagttcgatttggagtctttgattgaaccgctggtcccggctttaaaggaaaacctgaaagagctgggctacagcttgtcaggcgtctcagcaaaaaaacgggaaaacatgaagctcgctccgtttttggagtcccgttttgaacaaattacagagagcgcagtggatgtgaaaatatgaaggaatctgttccattaagaagagctgttgcgcttcactacgatgaaatgaaggacaaggcgccgaaggtggttgccaaagggtcgggatacacggcggagaagatcattgaagaggcgcagaaagccggtgttccgattcaggaagatgcgacgcttgtcgaattgatgcgccacttggagcttgacgaccacattcctgaagcgctttacgagatcgtcgccgagatcttttcattcgtctatacgcttgatgaaaaaatgaaaaagagggaatgacttttgaaaaaaagccgtttcctctattaattttatatttttaataaaataaaagtgtgaatgtttagaaggattttacgatttctcatcgaaacctagacaatcgatctatgattatataaaatgaaagcgcagtctatttttatttttgctacataagttaggaggatgggaaaatgaatatccatgagtaccaagggaaagaagtactcagaaaatacggagtggctgttccggaaggtaaagtggcatttacagcagatgaagcggtcaaagcagcggaagcgctgtccagctcggtttatgtcgtgaaagctcaaattcacgccggcggacgcggtaaagctggcggggttaaaattgcaaaatcaaaagaagaagtcaaagcctatgcggaagaattgttgggaaagacgcttgtcactcaccagacgggtcccgacggccaacaaataaaacgcttacttattgaagaaggctgcgatatcaaaaaagaatactatgtcggcctagttctcgacagggcgacttcacgcatcgtgctgatggcctctgaagaaggcggcacggaaattgaagaagtcgctgaaaaaacaccggaaaaaatcgtcaaagaagtgatcgatccggctgtcggactgcagagctaccaggcgagaaaaatcgccttcgccatcaatattccgaaagagcttgtcggccaggccgttaagtttatgatggggctgtacaaggcgtttactgaaaaagactgttccattgctgaaatcaatccgctcgtcgtcacaggggacggaaaagtcatggcccttgacgccaagctgaactttgacagcaatgcgctatacagacaaaaagacatcttggagtacagagatctcgatgaagaagatccgaaggaaatcgaagcatccaagtatgatttaagctatatttcgctcgatggaaacatcggctgcatggtcaacggagcggggcttgcgatgtcgaccatggacattatcaagcactacggaggggaaccggccaacttccttgacgttggaggcggcgcgacagccgaaaaggtaacggaagcgttcaagatcattttgtctgatcaaaacgtcaaagggatctttgtcaatattttcggcggcatcatgaaatgcgacgtcattgcagaaggcgttgttgaagcgacaaaacaagtcggtctgacattgccgcttgtcgttcgccttgaaggcaccaatgtcgatctcggcaagaagatcctcgatgattcaggactcaatattacgtctgcggaatcaatggctgacggcgcgcagaaaatcgtatccttagtgaagtaagaaaggcaggggaccaaaatgagtgtatttattaataaagacacaaaagtcattgttcaggggataacgggttcaaccgctttgtttcacacaaagcagatgcttgaatacggaacgaaaattgtcggcggagtcacaccgggcaaaggcggaacagaggtcgaaggggtgcctgtgttcaatacggtcgaagaggctgtaaagcagaccggggcaaatgcgtctgtcatttacgttcctgcggcttttgcggccgatgcgattatggaagcgacagatgctgagcttgatcttgtcatctgcattactgagcatattccggtgcttgatatggtaaaagtcaaaaggtatatggaaggcaagaaaacgagactcatcggtccgaactgcccgggagtcattacgcctgaggaatgcaaaatcgggatcatgcccggatatatccataaaaaaggccatgtcggcgttgtgtcgcgttcaggaacccttacatatgaagcggttcatcagctttccgaagcaggagtcggccagtcgacagcagtgggcatcggcggagaccccgtcaacggcacaaacttcatcgatgtgctgaaggcttttaatgaagatcctgatacacatgcggtgatcatgatcggcgaaatcggcggaacagctgaagaggaagcggctgaatgggtgaaagccaacatgaccaaacctgtcgtcggtttcatcggaggaaagacagcgcctccgggcaagcgcatggggcatgcgggcgccatcatttccggaggaaaaggcacggcggacgaaaagatcaaaacgatgaatgcctgcggaatcgaagtggctgaaacgccttctgtcatgggagaaacattgattaaagtgctgaaggaaaaaggtctttacgaaacgtgtaaaacacactgatgattaaaaagagcgggaatagtccgattggtctattcctgctttttcataactggttatatcgtttagtactttcagattgttttgttttaaaaatttttggaggtttttgaatgaacgacagcagcgagcttttgatattgctccgccttcgcggcacactctccccttctctgctgaccaagtggtggaagcaggacccttccttgtctcttacgggcgaaaaaaaccatcttttaacgaagctttcattaaaaagatcagacttgtgctccatacgaaaactggcggaacaagaactgtctaatgttaaacggctcatccgttcttacgaggcggccggcgtccgcatgaccgccatatcttcccctgattatccagccagcctgaaaaccattcatgacccgcctcccgtcctttttttaaaaggaaacaaaaaacttctccatgaacaaagactgatcggaatcgtcggaactcgctgcccgtcattatacggaaaaagagctgcggtccagcttgtcagggagctttgcaaaaacagctggacgatcgtcagcggtcttgcaaaaggaattgacggtctcgcccatcaggagagcatccgttcaaagggaaggacaatcggcgttatcgcgggcggattcaacagcatatatccccgtgaacatcgccagctcgccggacaaatggccgaaagccacctgctggtatcagagcaccctcctcacattaaaccgcaaaaatggcattttcccatgcgaaatcggctgatcagcggattaacggaaggaatcgttgtcgtccaaggcaaggaaaagagcggatcgctcattacagcataccaagcccttgagcaggggcgggaggtgttcgccgtgccgggtccgatctttgatgccaactctttcggtccttcaaggctgatccaggaaggggcgaaactcgtattaactattgaagacattttgaacgaacttccgccttcaaacgctcaatatacagagcctgtttagaattatcgtttgacaaaccgtattgtaatatttaataatagtgaggatttcaagtttaaacgctttaatcggcgttcaacatatagaaggattaaatcagacacttttcgtaaaaataatgactatataaacgacgattatgctgaatacaataaaaaggctaaattgaaaagagagagaacacctcttgagggggataatgttatgtccgaatacttagtcatcgtggaatcgcctgcaaaggcaaaaacgattgagcgatacttaggaaaaaaatataaagtaaaagcctcgatggggcacgtcagagatttgccgaaaagccagatgggcgttgacatcgagcagaactttgaaccaaaatacattacgatccgcgggaaaggccccgtgttgaaagaattaaaaacggccgccaaaaaggcaaaaaaagtttatctcgcagccgaccccgacagggaaggggaagcgattgcgtggcatttggcgcacagccttgatttggacctgaattccgactgccgcgtcgtatttaatgaaattacaaaagatgcgatcaaagaatcatttaagcatccgcgcatgatcaatatggatcttgtcgacgcccagcaggcgagaagaattctggaccgccttgtagggtacaaaatcagtccgatattatggaaaaaagtaaaaaaaggcttgagtgcgggacgtgtccaatctgttgcgctccgccttatcattgaccgggagaaagaaatcaacgattttataccggaagaatattggacaattgaagggtcttttctcaaaggtaaagaaacgtttgaagcgagcttcttcggaatcaacggggaaaagcaccagctgaaaagcgaagatgatgtgaagcaaatcctatcccggatcaaagggaacaaatttgaggtcaaaaaggtaacgaaaaaagaacggaagcgaaatcctgcgctcccatttacgacgtcgacgcttcagcaggaagcggcgcgcaaattgaatttccgggcaaagaaaacgatgatgatcgcccagcagctttatgaaggaatcgatctcggcaaagaaggaacggtcgggttaatcacttatatgagaacggattcaacccgtatctcgaatactgctcaagaagaagcggcatcattcatcggcgaacagtacggaaaagaatttttgggtagcaagcgaaagccggccaaaaagaatgaaaacgcccaggatgcccacgaagcgatcaggccgacctcggtgctcagaaagccttccgatctgaaggcggtattgggaagagaccagcttcggctatacaagctgatctgggagcgctttgtcgcaagccaaatggctccggcgacactggatacgatgagcgtcgaccttgaaaacaacgggttgacatttcgggcaaacggcagtaaagtcaagttttcaggcttcatgaaagtgtacgttgaaggcaaagacgatcagatggaagagaagaataagatgcttccggatctcgctgaaggcgataccgtgctttcaaaagacatcgagcccgaacagcacttcacacagccgcctccgcgctatacggaagcaaggctggtcaaaacgcttgaagaactgggaatcggacgtccatccacatacgcgccgacgcttgacacgatccaaaagcgcgggtatgtcgcccttgataataaacgctttattccgactgagctcggtgaaattgtgcttgacttgatcatggagtttttccctgagattattaacgttgagttcaccgccaaaatggaaaaagagcttgatgacgttgaagacggaaacattcaatgggtgcagatcatcgattccttttacaaggactttgaaaagcgtgttgaaaaagcggaagccgagatgcaggaagtggagatcgaaccggagtatgcaggtgttgactgtgaagcgtgcggacatccgatggtctataaaatgggccggtacggcaaatttatggcctgctccaattttccggactgccgcaacaccaagccgatcgtaaaagagatcggcgtcaaatgcccatcatgcaaaaccggcaacatcgtcgagcgcaaatcgaaaaaacgccgcattttttacggctgtgaccgctatcctgaatgtgaattcgtatcatgggataaaccgcttgaacggaaatgtccgaaatgcgaggacatgcttgtggagaaaaagctcaaaaaaggcgttcaagtgcagtgcgttaattgcgattataaggaagaacaacaaaagtagcggtgagcagggctttgctcaccttctttgttgtgttaaaagaataagtcaattcataaattaggagatgtgaatatgaatcaaacagtaaatgtcatcggtgcaggacttgcaggaagcgaagcggcatggcagcttgctaagcgcggtatcaatgtccgtttatacgaaatgaggccagtcaagcaaacgccggcgcaccatacagataaatttgccgaacttgtctgcagcaactcgcttcgggcgaattcattaacgaatgctgtcggtgtattaaaggaagaaatgcgggttcttgactcggccatcatcgctgctgctgacgaatgttctgttcctgccggcggtgcgcttgccgtagacaggcatgaatttgccgcaaacgttaccgaaaaagtaaagaatcatccgaatgtgaccgtgcttcatgaagaagtcacggaaataccggaaggaccgacaatcattgcgacaggaccgctgacatcagaagcgctttccgcaaagctccgggagctgacaggcgaggactatctatacttttatgacgcggctgcgccgattgttgaaaaagacagccttgacatggataaagtctatttgaaatcccgctatgacaaaggggaggcagcgtatttgaactgtccgatgacagaagaagagtttgacaggttttatgacgcccttgtgtctgcggaaaccgttccattgaaagaatttgaaaaggaaatcttctttgaaggctgtatgccgattgaagtcatggcgaagcgcggcaaaaaaaccatgctgttcggcccgatgaagcctgtcggacttgaagacccaaaaacaggaaagcgtccgtacgccgttgtgcagctgcgccaagatgatgcagccggcacgctttacaatatcgtcggttttcaaacccacctcaaatggggcgaccaaaaagaagtgctccgcctcattccgggactggaacaggcagaaatcgtccgctacggcgtgatgcacagaaatacgttcatcaactcgccgagtctgttaaaagcgacctaccagtttaaaaagcgggacgatctgttttttgccggtcaaatgacaggtgttgaagggtatgttgaatcagcggcttcaggtcttgttgccggtataaatgcggctcggctcatccagggaaaagaacctgtcactttttcaaatgaaacagcgatcggcagcatggcccattacattacggaaacaaacaagaaaaacttccagccgatgaatgcaaacttcggcctgttcaaagaattgggtgttaaaattaaaaacaagcaggaacgaaatgaacagtatgcttcgcgcgcattggagacaattcgaaatatttcgaaaacgctatagttattcattgccagatgaacttgttatgtgataacatttaaaagcccttttcgaagaggtgtaatgatggcaaatgttaagaattttttaactttattcattgaatatttacaaatagaaaagaattattcaaaatatacaattgtgggttacatttcttccattgaagactttgaacgctttttacacgttcagggcataaagggttttgaagacgtgacttatccggatgtgagaattttcttgacggaagcgcatgaaaaagggctcactcgcaggacgatcagcaagaaaatttcggctctgcgtagcttctataaatttttattaagggaaaagctggtaaaagaaaacccgtttctgcttgtcagtctcccgaaacaggataagcggattccgaagtttttatatgaaaaggaacttgaagaactgtttgaggtttcggatttgagtacaccgctcggccaaagaaatcaggcgctcctggaatttctctacgcgacaggcatgcgggtaagcgaactttgcagcctgaaggaatctgatttggatctgtttttagatacggttttggtccacgggaaaggcaggaagcaaaggtatattccatttggttcattcgcccgggaggctttggatctgtatttgcaaaatggaagacgcatccttctgttaaaagcgaaagagccctgcccttttatttttttgaatcaaaggggcgggcccttaaccccgaggggggttcgttacattttgggagaactggtcaagaagacttcgggtacattacatatacatccgcatatgctccgccatacatttgccacccatttgttaaatgagggtgcggatctgaggagcgttcaggaactgcttgggcattcaaatctttcttcaacccaggtgtatacgcatgtatctaaagatatgctcagaaagacatatatgtctcatcaccctcgggcacataaagggaaataaaggaggttcttttatgtcatcttttcacgcaacgacgatatttgccgtccagcacaacggaaaaagcgcgatggcgggagacggccaggttacgttcggtcaggctgtcgtcatgaagcataccgcaagaaaggtaagaaaactcttcaacggaaaggtcattgccggttttgccggttctgttgcagacgctttcacgctctttgaaatgtttgaagcgaagcttgaagaatacaacggcaatttgcagcgggcggcagtcgagcttgcaaaagagtggcgaagcgataaagtcctcagaaagcttgaggcgatgctgatcgtcatgaatgccgacagcatgctgctcgtttccggaacaggcgaagtgattgaaccggacgacggcattttggcgatcggctcaggtggaaactacgcgcttgcagccggaagggcgctgaaacgtcatgccggcagccagcttgacgcgaaagcgattgcgagggcttcacttgaaaccgcgggcgaaatctgtgtgtatacgaacgatcagatcattgtagaagaacttgaatagaaaggatatgaggcatatggaaaaaaagccgctgactcctaggcagatcgtcgaaaggcttgatcaatacatcgtcggccagctcgatgcgaaaaaagcggtcgccgtggcattgaggaaccgctacagaagaagtcttcttgatgaaaaactgcgcgaagaaatcgttccgaaaaacatattgatgatgggcccgacaggtgtgggaaaaaccgagattgcaagacgaatcgcgaaactcgtcggcgctccgttcgtcaaaatcgaagcgacgaagttcacggaagtcggttatgtgggcagagatgtggagtcgatggtcagggatcttgtggaaacgtcagtccgcctcgtcaaagaggaaaaaatgaacgaagtgaaaggcatcgctgaagaaaacgcaaataaacgcctcgtccgcctgcttgtaccgggaagaaaaaaacagacaggtgcgaaaaatccttttgaaatgctgtttggcggaaatcaggatcaagaaactggtgaagcggaaaagcaagaagacgcggatatcgaaaacaaccgaaaacggattgcgcatcagcttgctctcggcgaacttgaagaccattatgtcaccgttgaggtggaggagcagcagccgtccatgtttgatatgctccaaggctcgggtatggaacagatgggcatgaacatgcaggatgcgctcagcagcctgatgccgaaaaagaaaaagcgccgcaagcttacggtcagggaagcgcgaaaagtgctgacgaatgaagaagcggcaaagctcatcgatatggacgaagctgcccaggaagctgtccagagagccgaacagtcgggaatcatctttatcgatgagatcgataaaatcgccaaaaagagcggtgcttcttcatcggcagacgtctcaagagaaggcgtgcagcgcgatattcttccgattgttgaaggatctaccgtcatgacaaagtacggtgcggtcaaaacggatcacgttctgttcattgctgcaggtgcattccacatggcgaagccttcagatctaattcctgagctgcaggggcgctttccaatacgcgttgagcttcaaaagctgagcatcgatgactttgtgaaaattttaactgagcctgacaacgctcttcttaagcagtataaggctttattgaagacggaaggtatatctcttgaattttctgacgatgctattcgtaagattgcagaagtggcttatcatgtgaaccaggacacagacaatattggggcgagaaggcttcacaccattttggaacgtcttttggaagaactgtcattcgaggctccggatgtgacgatggaagaagtggtcatcacgcctcaatatgttgaagaaaagctcggttcgatcgctaagaataaggatttaagccagtttattttataaacaattaaataagagtaatttaggaggatcaatttattatggctttattacaaaaaacaagaaagattaatgcaatgctgcaaaatgcggcagggaagccggttaattttaaagaaatggccgaaacgcttcgcgatgtgattgattcgaacattttcgtcgtcagccgcagaggaaagcttctcggtttctcgatcaaccagcagatcgaaaatgaccggatgaaaaaaatgcttgaagagcgccagtttcctgaagattatacaaaaagcctgttcaacattccggaaacgtcatctaaccttgacatcaacagcgaatacacagctttccctgtggaaaaccgcgatttgttccaagcgggtctgaccacggtcgttccgatcatcggaggaggcgaaagactgggcaccttgattctgtcccgccttcaggagaaattcgaggatgacgatctgatccttgccgaatatggcgccactgtcgtaggaatggaaattctcagagagaaagcggaagagatcgaagaggaagcgcgcagcaaagcggtcgttcaaatggcgatcagttcactatcttacagcgagcttgaagcaattgaacatatttttgaggagcttgacggaaatgaaggcctgcttgtcgctagtaaaattgcagaccgcgtcggcatcacccgctcggtcattgtcaacgcgctccgtaaacttgaaagcgccggtgtcattgaatcaaggtcactagggatgaaaggcacatacatcaaagtgctgaacaacaaatttttgatggagttagaaaaactaaagtctcattaaaaggcgaaagccgcagaacatgccgttctgcggctttttttatttcatgttttaaactatattatcgtaattttttcatatcaaaaaacaactaaaacgcggtgcaaaatcaatgcgttacttgaataaaagatatactaacataattttttgaaactttaatgaacgtaacattacatagttcttataatctaggtcaaaatacctattcataaaatagatatttcttacgatttttttttgcttccagatcatagactttaagcctattattccttacaataggcttatggtttttacaattctcgacaagattttaagacagatggaaaaagattggaggtatttggacggtggatatattttcaggaacgatacatagactagagggagccttgaatcaagcgaacattaagcaaaaagtcataacgaacaatctggccaatgtagatacaccgaactacaaggcgaaaaaagtatccttcaaaaatgtgctgaatgaggagtcctcccggattaatgccataaaaacagactatagacacattgactttaaagggaatgagccaaattattcagttgtgtcgagaaagaatacaacttatcaagaaaacgggaacaatgtggacgttgatcaggaaatgagtgaaatggcgaaaaatcaaatccagtatcaagcgctggttgaaagaataagcggaaaattcaactcgctaagaaccgcgattacaggaggtaaataatgggggtattcaatagcatcaacatttcagcttcagcgttgactgcacagagagtcagaatggataccgtttcttccaacctggcaaacatggatacgacgagagcgaagctggttgacggacagtggcagccgtatagaagaaagcttgtatcgacggctccgaaaggcgaatccttttcatccgttctccaatcatcgatgaatgcatcggcgagagtcggcgaaggggtgaaggtgaccaagataagcgaagacaaaacaccgtttaagctcgtttatgatccgacccatcccgacgcaaacgaagacggatacgtgcagatgccgaatgtcgatccgctaaaagagatggtcgatttaatgagcagcacaaggtcatatgaagccaatgtcacagcaatgaacgcgacaaaaggaatgctgatgaaagcattagaaatcggaaagtagggtgatgacacgaatggttaatggaatctctccgtttggagttcaatccgtgcaggcgggaacgaatgcaacaaatcagatcaagaacaagcaggacggttcagagaaccaagtcagcttttccaacgtgctgaaagattctatcaatgctttgaatcaatctcaaaatgaatctgataaactgacaaacgcgcttgctctcggtcaggatgtcaaccttgatgaagtgatgattgcagcccagaaggcaaacattacattgacggctgcgacggaattccgcaacaaagcggttgaagcttatcaggaaatcatgagaatgcaaatgtaagaaaggagtctgaaagcgaagagaattagtgtaactaccgggggagtaagatgaatcgtaatttattgcaaattaaaacgaaaataactgatttttggaaaaacagatcaaagctgcagaagattctgctgatcggcattgtcgctctggcagtcatcctgtcaatcatcattggaattgttgcttcgtcaaataaaatggtgccgctctataaagatttgtcagctgaagaaaccggccaaatcaaacaggtgctcgatgaaaaaggtattccatctgaagttgcgactgacggttcagtcatcaaagttccggaagaaaaagtcgatgaactgaaagtcgatcttgccgcagagggccttccgaaaagcgggagcatcgattattcattctttggcgaaaatgccggtttcggcatgacggacaacgaatttgacgttttgaaagtgaaagccacgcaaaccgagctatccaacctcatcaaaggaatagacgggattaaagattcgaaggttatgattaacctgccgaaggaatccgtctttgtcggagaggaaaagccggaagcatccgcttcgattgttcttcaggtgaagcccggccacacgcttgatcaaaatgaaatcaacggcctttatcatctcgtatcgaaaagcgtgccgaaccttgacccgaaaaacatcgtgatcatggatcaaaactccacatattacgatcaaacaggcaaagagtccggttcttacgccgacagctattcttcccaaagggaagtcaaggcccagatcgaaaaggacctgcaaagacaaatccaaaccatgctcggcacgatgatgggacaggataaagtggttgtatccgtcacatctgacatcgatttcacaaaagaaaacaggacggaagacctggttgaacctgtcgacaaagaaaatatggaaggaatcacggtcagcgcagagcgcgtcagtgaaacatattccggacagggagcacaagcgggaggcgtcaacggaacaggtgaaaacgatgtaacgaactatgctgaaacagaaggcggaacaggcaacggagactatgagaaaagcgaagaacgaatcaacaatgaagtcaacagaatccataaagaaatcgctgagagcccgtacaaaatcagagatctgggcgtccaggtcatggttgaaccgcctgatgcaaacaacccgcagtcactgcctgctgaaagggaggacgatattaaaaaaatcctctcaaccattgtgaaaacatcgattgacaagaactatgaagaagagcctctgacagatgaggatgttgaaaataaaatcgttgtttctgtccaatcgttcgacggcaagcagacaatcgatgaaggaacggaaacaggcggcataccgatgtgggcttacatcgcaggcggagcagcgcttgttgctgtaatcggcctcatcatctggcttgtcagaagacgtaaaaatagagatgacgaatacgaggaagaatggtatgaaacgcctcaggagccgattcgggttgctgatgtgaacaatgaaaaagagacagaagaaactgtcagacgaaaacagcttgaaaaaatggcgaaagacaagcctgaagaattcgccaaattactgcgcagctggctgaccgaggattaggaggagtattgaaatggcaaaaatgaaacaagacaggcttacaggcaaacaaaaagcggccattctcatgatatccttagggcttgatgtgtcagcttccgtttacaagcatttaacagatgaagagatcgaaaggctgacgcttgaaatatcaaatgtcagagctgtatcacctgagaaaaaagatgagattattcaggaatttcatgaaacggctattgctcaagaatatatttctcaaggcggcattcattacgccaagcaggtgcttgacaaagcgctcggcgaagacaaagccgccagcattatcaacaggctgacatcgtctcttcaagtcagaccgttcgattttgccagaaaagcggatcccgagcagattctgaactttatccagcatgagcacccgcagacgatcgcattgattctgtcttatctcgatcccgtgcaatcgggtcagatattgtcagagctgaatcaggatgtgcaggcagaggttgcaagaaggatcgctgttatggacaggacgtcgccggaaatcatcaatgaagtcgaacagattctggagcaaaagctatcgtccacattcactcaggactacacgcagaccggcggtatcgaagccgtagtcgaagtgttgaacggagttgacagaggtacggagaaaacgatccttgacgcccttgaaattcaggatcctgagcttgccgacgagattaaaaagcggatgttcgtctttgaagatatcgttacgcttgataaccgcgctattcaaagggttatccgcgatgtggaaaacgacgatctgcttctttctctcaaagtggccagcgaagaggtcaaagacatcgtcttcagcaacatgtcgcagcgtatggctgaaacatttaaagaggaaatggaattcatgggccctgtgcgtctgcgtgacgtagaagaagctcaatcgagaatcgtaagcgtcatccgaagacttgaagaagcaggtgagatcgtaatcgccagaggcggaggagatgatatcattgtctaacattattaaacagcgattatcatcaataccgcaaaaagaaaggcggacgatttcattaaaggaagtcaaacttcctgagacagaaaccgaacttgataccggacaggatccggaatacctcctcgaccatgccagacaagaagccggaaaaatatacgaaaaagcgagcgctgaactcgaacaggtcagacggcaaatcgaagaggaacggtcaagctgggaaacagaacgcgaagcgctgatagaccaggcgaaacaagaaggctttcaagctggatttgaagagggaaaggccgaggcccgaagcgcttatcaagcgtatttggatgaagccaatgccatcgtccgggcggctagacgtgactatgaagaaaaaatcgaacaatcatccgaagaaattgtcgaacttgccgtgtcactggctaaaaaagtttggaatcaaaaggctgacgacaaagaagcttttacagccctcgtaaaacaggtgctgtcggaaatgaaggaattcgatgacattgccatctatgtagatccggagtactacaccgaggttcaaagccacaaaaacgaacttgagcagctcctccaatacggcgcccatatcgcgatatacgccgatgaaaaagcgccgaaaggaacgtgctatgttgaaacggctttcggaagaatcgatgcaggcatcgacactcaattgcagcagctgaaacaaaaactgctcagcctgcttgaaacggcaggtgttgtccggtgatgctcaagcagctgcttgaatgtatagaaaccgcagattcctacaaacgatacggaaaagtcaaacaggcggtcggcctgatgattgaatccaaaggacctgaatgttcaatcggcgatgtctgcaaaatctatacaaaaggtgacgggccaaaggctattaaagctgaagttgtcggcttcaaagaccaaaatattcttctgatgccatatttggaagcggccaatattgcccccggcagcattgtcgaagcgacgggcgaatcgcttagggtcaaagtcggctccgggttgatcggacaagttgtcgatgcattcggcaatccgctcgacggcagcgtgcttccgaaaggtctggctcaagtatcgacagaccaggcgccgcctaatccgatgaaaaggccgccgatcagagaaaaaatggcggtcggcgtcagatcgatcgacagtctgctgaccgtcggaaaaggacagcgtgtcgggatattcgccggaagcggcgtcggaaaaagcacgcttatgggaatgattgcgagagagacggccgcagacttgaatgtcatcgctcttgtcggagagcggggccgggaagtcagggagttcatagagaaagatctcggcgaagaagggctgaagcgaacgatcgttgtagtggctacatctgaccagccggcgctgatgcgtctgaaagcggcctatacagcaacagcgattgccgagtacttccgcgacaaaggacaaaacgtcatgttcatgatggactcggtgacaagggtcgccatggcccagagggaaatcggcctggcgacgggcgaaccgccgacgacaaaaggttatacaccctcagtgttcgctattttacctaagctcttagaacgaacaggaacgacggaaagcgggtcaataactgctttctatacggttcttgtcgacggcgatgatatgaatgaaccgatcgccgatactgtaaggggaatcttggacggccatatcgttcttgaccgagcccttgcgaataaaggccagtttccggcagtcaacattttaaaaagcatcagcagggtgatgtcgaacatcgccgagaaagaccatatcagagcagcgaaccggttcagggaaatgctgtcaacctatcaaaactcagaggatctgatcaacataggagcctataaaaaagggtcttccagagaaattgatgaggccatacaattccaccctaagctgatcagcttcctcaagcaggaagtggatgaagcggcatcgctggaagagagcatttccttattaaagagtcttacaggaagagaggattaagaatggcttattcatttaaatttcaaaagctcctcgagcttaaagaaaatgaaaaagaccaatcatttgctgaatatcagcactcagtttccgaattcgaaaaggtcgcggaaaagctgtatgaaagcatgagccaaaaagaaacgctggaaaaaaacaaggaaatcaagatgcagacggggatgagcgttcaggaaatgcggcattatcagcaatttgtcacaaatcttgaaacgacaatctaccattatcaaaagctcgtcatgatgaagagaaatgaaatgaatgaaaaacagcacgatttgacggagaaaaatatcgagctgaaaaaatttgaaaaaatgaaagaaaagcagtttgaaatgtattcgctgcaaaacaaagcaaatgagttaaaggaaatggacgatatctccattgcccagtacataactcaaggaagctaggggtagaaaaacgatgaccgaagaaaaaaaagccggtaaatttcagacatttttgtttgtcatcgtcattccgctgatctttttaatcgttgtagcgttcgtcggcatgtggcttttgggcgtcaattttcaggatgcagcctcaaaaattcccgtcgtaaaagagcttgtgaaaaacggcgaggatcaggacatagatcacgcaactaaacagcaggagaacaaagcagaaaagctccaaaagacgatcgatgaacaaaaaagcgaaatcgaaacgctgacgagtgacttaaaaacgagtgatcaagagattaaaaggctgaaacaaaaaatcagctcgctcgaaaaaacggaaaaagatgaaaaagagcaggataaaaagaacgccgaaggtcaaggagacggaaaagtcgtcaaaatttatgaaagcatgcaaagcaataaagctgcaaaaattttaagcgaattaaaagaggaagaggcaatcaatattttagattctttaagcaaaaagaaagtgactgagatcctctcaaaaatgtctcctgataaagcggctgtattcacagaaaagcttgtgaaaaacgaggcgaaaaacgaagcgaaaaaagaagggggggaatagcttgaggctttttgacgcaatctcctttgatgccaaacctgcggtggacactgcacctgcaaaaacgagcaagacgccgttgggcgcgctctttcagaatgtgctccagaaggaaaacagctcactttccccttttcaaaagggagaagagccttctcaggatacgccgttggaagggcttttgcatgaactgaagcaatggctttcaaataaggaagacagctctttcaatgaagactggctgaattcccttcagcagcttgaagagctgaatgcatctccggatgaactggcattggcagaacagctgttacaacaaataaaagagctgcttgaaaaagccgccctgcctgaacaatcaggcaaaacggctgatgctaaagctttgcctgccgacgaaagcgggacagaagagccgaaaaagcccgacctgcaaattctcggccagattcagcagctgctagctgcgattgtaaatgaaaatcaaccgtcactcaaaacttcgcaaatcgcagaattattgaaacaggcgccggaatttctcgccgctcttcaaacaaaggcgggagcagaagggctgattgatgagcttaaacgtcaatttttcacgaaagatccgagccaatcgcagcttttgtccatgtcaaacaccgagctgaaaagcttgaaaagcttaatggagcagatgatgaacgcaaacgctgaaccggatcaaaaagagtggaaaatggccgaaagcgaactcaaggcaatgctcatgagcaagaaaaccgatgtttctctttctgagaagccgttgtcctttgttttgaacagaagagaaattcaaactgaaggaaagcaaggccaaaaggaacagccgattcaatcctctgtactggccaatcatcggacaggcacagcgctgatccagggtctccagccttcggcggcagaggaagcttccgctcagccgaaaagcttttcagaacaaattctcagctcatggaaacagatgaagtatacgccgttcggcaggtcgacaggcagtttcacgatccgcctgaatcctgaaaatcttggctttatcacgatcaagctcgtcaaacagcacgggatgttttcaagcaaaatcatcgcatcgacccagtcggctaaagagctgctcgaacacaatctcgcgcatcttaaacaggcgctgcccaacatgtctgtgcaaattgaccgcttcggtgttccgcttcaaaacagcgatcagactttcggacagctggcggacgatgagaaaaaccagcatcagccgaagcaagatcagcaaagtaagcaggaaaatgaggattttcaggagtttctggatgagcttatcgagactcgatcacaggacagcgaggaggagatctaatgtctgatacttcaattgataccagaaccgccttaggaacaacaaacacgaaatcgacgacatccgattttttatccgaggcaaaaaaagccgagaaagcagggagcggctccaatcttgggaaggatgaatttttgaaactgctgatgaaacaactgcagtaccaagatcccttaaatccgatggaagaccgcgaattcattgcgcaaatggcgaccttttcaagcctagagcagctaacgaatctgaacacaacgatgtcgacgttcgtcggacttcaggacccgatgacgatgtatgtcagctggatcggaaaagaagtcacctatgaaggcgaagacagcgaagaaaaaacggcgctcgtcaaatcagttaaaagctcagacggacagtatctgcttgtccttgacgatggaaccgaagtcaatccgtggaatgtgacggcggtaagccattctgataaataaaaacagacaattcagggaggaataattatgttacgttcactatactcaggaatcagcggcatgaaaaactttcagacaaagcttgatgtcgtcgccaacaacatctcgaatatcaatacggcaggctataagaaaagccgggttacgtttaaagatattgtcagccagcagctttccggcgcgtcgtcgtctactgcaaaccgcggctctgtaaacggccagcaggtcggactcggtgcaacgatcggatcgatcgatatcattcacacaaacgcagcgccttcgacaacaggccgccagcttgacatgaccattacaggagacggctacttccgcgtcggatcaggagatgaagtgtactacacaagatcaggaaacttctaccgatctgatgaaggtgacctcgtcactgttgacgggctgttcgtcttaacggccaataatggaagaatcaacattccgcaagacgcgcaaagcttcagcatcgctcctgacggaaccgtttcttatgtcgatcaaaacaacgagaaccagaccgccggccagatctcgcttgcgacattcagcaacacatccggattatcaaaagctggagacaacctttaccgcgaaacattgagttcgggagatccgcaagtcgttgtacctggggaaggcggctcaggaaaaattcaaacgagtgcgcttgaaatgtcgaacgtcgacctttcagaagaattttccgaaatgattatcgcgcagcgcggcttccagtccaatgcgaaaatcattacaacctctgatgaaattcttcaggaactcgtcaatctgaagcgataggagggaaggaggcgccctcgtgaaggcgcctcttgataacacatgatcaaagttacgcgattaaacggacagccctttattctgaatgcactattcattgagcaaattgaatgttttccggatacgacaattacgctgtccaacggaaaaaagtttgttgtcaaagaagatgaagatacagttgtggatacaatcgtgtcattctatcaaaaaatccaaatactttcttgtgaccaaagaattgaggaatctgaatgaataaaaaacttctaggaattatgatgacgattattttggcaattgctgtgttgggaaccgctgcgttctttgtcatcaagggaagcgcaagtgaaaaagatcaaaacgcagaaccttcgatcgatgaagtggtcgaatcttcagttgaagtcgccgaaatcacgacaaacttgaaatcagacaatgtagtccgtttgtcaatcaagcttgaaaccgattcgaaagaggcgaaagaagagcttgaaaagcgggatttccaaattaaagattcagtcatctcccttttggcgaacacgaacgcagatgagcttgaaggacaaaaaggaaaagaaaaatttaaagaacagctgaaagaaaagctgaacacgaactacatgaaagagggaaaagtgaaaactgtgtacattacctcctttaatctgcagtaggaacatagatgacagaaccatggaggtgaaaacagatggcaggagaagtgctctcccaaaatgaaatcgatgcactgctttcagcgatatcgaccggtgaaatggacgccgacgagctgaaaaaagaagagtccgttaaaaaagtaaaagtctatgactttaaacgggcgctccgcttttcaaaggatcaaatccgcagcttgaccaggattcacgataactttgcaaggctgctaacgacttatttctcagctcagttgagaacctatatccaaatctcggtcagctcggttgatcaggttccgtatgaggaattcatcagatcgattccgaatatgacgatcctcaatctgtttgaggttcgccctcttgaaggaagaatcatgatggagatcaacccgaccatcgcctatacgatgatggaccgggtgatgggcgggatcggctcgagccacaacaaaattgacagcatgacggagattgagacgaaaatcatgtccaatttattcgaaagctgtctcacgaattacaaagatgcgtgggaatccatcacggaaatcgagccggaaatgtccgattttgaagtgaatccgcagtttgtgcaaatggtatcgccgaatgagacggtcgttgtcatttcgctgaacacgcaaataggagacatcagcggggttatcaacctgtgcatcccgcacgtcgtcctggaaccgatcattcctaagctttccgttcactactggatgcaatcagacagaattgaaccaaaaccggaggaaacaaagtcgatagaaaagcggattttgacggcgcaaattccaattgtcgcagaactcggatcatcggaattaaccattgaagagtttttaaatttagaaattggagattgtatcactttggacaaatcagtagcagaacctcttactgttttggtcggagataaaccgaaatttctagcacaagccggccgaatgaatcgaaagactgcgattcaaattctagatcacgacataagaggtgaagaatatggagaataacaataggttatcacaggatgaaattgatgcgctgcttaaaggcggcgatgatacggctcaagagcagccagaatcagggttgtccctgatggaacaggatacgatcggggaaatcggaaacatttcctttgggagctctgcaacagctttgtccactttattgaatcaaaaagtcgaaattacaacgccgactgtttcggtgattgaaaaaagccatttaaatgatgagttcccgcacccgtatgtttcaatcggtgtgagctatacagaaggtttttcaggaaacaatcttctcgtcatcaagcaggaagatgccgcgatcattgctgacttgatgatggggggagacgggacgaacgcagatccgtcgcttggcgaaattcatctaagcgccgttcaggaagcgatgaaccaaatgatgggttccgctgcgacatcgatgtccaccgtcttcagcaagaagatcgatatttctccgccggaagttgacctccttgatgtgaaagaaggggaagggacagagcaaattccgaaagaggacccgctcgtcaaagtatctttcagactaaaagtcggagatctgatcgattcgcatattatgcagctttatccgctgacctttgcaaaagatctgattgatgaattaacaaatcaggacggcggagaagagcctgtgaagactgaagaggtacagacgcccgtacaggaaaaaccggcgcctaatccgaattcggcacctgctcagacacagagacaggagcctgcgcctaaacggcaagggacggcaaaagtttcagagcctgtgcaggtggcaccggcagagtttcaatcctttgcccctcagactgaagcgcagccgcaccttcaaaaccttgacatgctcatggatattcctttgtccgtcacggtcgagctggggaggacaaaccgcagcgtcaaagaggtgcttgaactgtcaaccggcagtatcattgagcttgacaaactcgccggtgagcctgttgacatcttggtcaaccagcgcgtcgttgctaaaggcgaagtcgtcgtcatagacgaaaacttcggcgtcagggtgacagacattttgagtcaggctgaacgaatcagcaaattacgataataacagattgattggagagattaataatggcttacaagattttagtagttgatgatgcagcatttatgagaatgatgattaaagatattttggtgaaaaacggctttgaagtcgtcgcagaagcgcaagacggggcacaggctgttgaaaagtataaagagcattcacctgatcttgtcacaatggatatcacgatgccggaaaaagacggaatcacggctcttaaagaaatcaaggaaatcgatccgcaggcaaaaatcatcatgtgttcggcaatgggccagcaatcgatggttatcgacgccatccaggcgggagcgaaagactttatcgtcaaaccgttccaggctgaccgcgtcatggaagccatcaataaaacgctaagctaaagggtgtacaacttgtttaagaaacctcttattttcatagccggcctttgtctatgcgcctttctcgcattgccgtacgctccggctctcgcagaggaatcgggggaccagaccgttgatcatctgtttgagcaaaaaggtgcgggcaaagagaaagaaaaagcaaaagacaaagacaaaaccgaggaaaaaagttctctaaaggaagaggcggagaccgaacccccgtctccttccgtttccatatttgattttgtgaaaatgatcggcgcgttactgttcgtcatttttctgatctatgctttggtcaaattcatgaataaacgcaaccgtttgctaaaacccttccagtatgttgaaaacatcggcgggacttcactcgggcaaaacaagtccgtacagctgattaaagtaggaaacagggtgctggtcgtcggtgtcggcgaaaatatccagctgctgaaagagatcgatgatgaaaaggaatataaagaaattctcacgcagcatgaagctgcgatgaacagcaagattgaatggcagaaatggatggatcaagtcaaagttccaggcgtgcaaaaacaaagcggcacggcatctttttccgagtcgttaaaagcacagcttgcggaactgaaacaaaatcgcgcagaaggcagaaagaaaggccaaaatcaacatgaatgagtttatggatttatttaattcaagcgatgcggcaaatgtcagcgccagcgtccggctcttgctgcttttgacagtattttcgatcgctccgggtatcttgatcttgatgacttgtttcacaagggttgtcatcgtcctgtcctttgtccggacatcgctggcaacacagtcaatgcccccaaaccaggtgctgatcggacttgcactgttcctgacatttttcattatggggccgactttttcagagattaataaagaagcgctgacgcctttaatgaacaataaaatcaccttggatgaagcttatacaaaagcggaagccccgatcaaaacatttatgagcaagcatacaagacagaaagatctggctttatttatgaattacgcaaagatggaaacgcctgagtccatcaatgatattccgctttcaactatggttcctgcgtttgtcatctcggaattgaaaaccgcgtttcaaatgggatttatgatatttataccgtttctgattatcgatatggttgtggcaagtgttttgatgtcgatggggatgatgatgcttccgccggtcatgatttcactgccgtttaagattttgctgtttgtgcttgtagatggctggtatttaatcgttaaatctttgctgcaaagcttttagagtaggtgctaatacatgaattcagaatttgttatatcgatggctgaaagggctgtatacgttacattgcttatcagcgggccgcttttggcgctcgctcttctcgtcgggctgatcgtcagcgtttttcaggcaaccacccaaatacaggaacagactcttgcattcattccgaaaatcgtcgccgttttggtcggactcgtcgttttcggcccgtggatgctgtcgacgattttgtcattcgcgactgagctgttctctaatttaaaccgttttgcagggtagttttaacatgtcaataatcgaatcatttccagcctttttacttgtgtttgtcagaatcacagcattctatgtaacggtgcctctattttcttatcggacaattccggccgttcataaaataggttttgcattttttcttgcgctcgtcagttttcaagcgattgaaaagcctcctcaccttgacgttgacggaatttacatgatgttggccatgaaggaagcgctcatcggacttctgcttgggctgatcgcttacatgatgatctcagccgttcaaatcgccggatcgttcattgattttcaaatgggatttgcggtggcgaatgtgatcgatccacagacaggggcgcaaagcccgcttgtcggccagtttttatatacgatggcgctgcttctcatgctgagcctgaatgcgcatcatctcctgcttgacgggatctattacagctatcaatacattccggtcgacaagatggcgctgtcgtttggaagcgaagaatttgccgagtttatcgcaaaaagcttcaatacgatgtttattacagcatttcaattgtctgcgcctgttgtggcttgtttgtttttagtcgatctggcattggggattgtggcgagaacggtgccgcagctcaacgtgtttgtcgtcgggcttcctttgaaaatcgcgatcacctttatcatgctcatcatctgcatggccgttatgttcagcatgatgcagcacgtcttcgaatttgccattcggacaatgagagatctattaactttgcttggggtggcatgatgaagctgacgttggatttgcaatttttcgcaggtgaaaaaacggaaaaagcgacgccgaaaaaacggcgggaaagcagaaaaaaaggtcaggttgccaaaagtgcagatgtcaatacggcggtcactcttctcatcgtgtttttatcctttttattcatcggaccttttatgagagaccgcctgctcggcctgatcgaaaagtattacaaagaattaatcacgatgaaggtgtcagtcgccaatattcccggcctgtttcaaagtgttgtgcttgaatcgggcctcattatggcaccgcttttgctgacagccgtcgtctctggggtattgagcaactatatgcaagtcgggtttttatttgcccctgaagcgatcaagcctgatttgaaaaagcttgacccgcttaatggattcaagcggatttacagcatcagggcgatcgttgaactgcttaaatcgattttaaaaatcgtgattgtcggaggcgtgacattcgccgttttatggctgaactttgacaaaattctcagaatccaggcgctgtcggctggcgaggctttgtcatatgtcggctggctcacctttttaatgggggtttccgctgcagtcgcattaatttttctcgcggtgctcgattacctctatcaaaaatttgactatgaaaaaaatattcgcatgtcaaaacaggacatcaaagacgaatacaaaaaaaccgaaggcgatcctctgatcaagtcgaagatcaagcagaagcaaaaggaaatggcgatgcgccgcatgatgcaggaagtgccaaaagcggatgtcatcatcacaaacccgacccattacgccgtcgcattgaaatacgacgaaaacaaaatggatgcgccgtttatcatcgcaaaaggggtcgatctaatggctctgaaaatcaggcagatcgccaaagaacacgatgtcatgacggtcgagaacaggcctttggcaagggcgctctatgaccaggttgagatcgaccaggccgttccggaagaattctttaaggccgtagccgaaatcctggcctatgtttacaaaacaaagcaaaaaatctagtgaatttttcagttttaaaaggagagaaacagcatgtctgcaagagatttatctattttatccggcgttgtcctcattgtggcaatgcttatcataccctttccaacatggatgttgagcatcttaattatcgttaatatttctcttgcgttaatcgtgcttctcaccacaatgaacatgcaagaaccgctgcaattttcgatttttccttctttgctgctcctcttgacgctgttccgccttgggctgaatgtatcgacgacgcgttcgattctgtccaacggtgatgcgggaaaagtagtcgagacgttcgggtctttcgttgtcggcggaaacgttttggtcggtctcgttgtctttatcattttgatcattattcaatttatcgtcataacgaaaggggcggaacgggtatctgaagttgctgccagattcacgctcgacgccatgccgggaaaacagatgagcattgatgccgatttgaatgccggaatggtgaccgagcaggaagcgaaggtgcgccgtgagaaggtggcccgtgaagccgacttctatggagcgatggacggagcgagcaaattcgtgaaaggggatgcgatcgcagggatcatcatcgtccttatcaacgtcattttcggaattgtcatcggcatgctgcaaaaacaaatgagcattcaggaagccgcttcacactttacactcctgtctgtaggcgacggaatcgtatctcagctgcctgcgctcttgatctcaacggcgacgggtatcgtcgtgacaagagcggcgtcggacggaaacctcggccacgatattacaggccagctgtttgcctatccgaagcttttgtatgtcacggcgggaacgattttcctgctcgggattttcacgccgatcggcattctcctgacaggccctctggctcttcttctcgccgcaggcggctatatgctctccaaagccggtgaagagaaggaaaaagtggaggatatccttgaggaagaagctgaagtggatgaattaaaaagccccgaaagcgtcgtccatctgcttgatattgatccgatcgagtttgaattcggctacggattgattccgcttgcagatgcaaatcagggcggcgatctgttggacagaattgtcatgatcaggcgccagctcgcgcttgaactcggacttgtcattccggtcgtcagaatcagggataacatcgctcttcagccgaacgagtacaggctcaaaattaaaggaaacgaagtcgcgaaaggcgagcttctcctcgatcactttctggcgatgtctccgacaggcgaagacgatcagatcgaagggattgacacaatcgaaccgtccttcggtcttccggctaaatggataccggaatctcagaaagatcaggccgaaatgctcgggtacacggttgtcgatccggcttcagtcgtatcgacccatattacggagcaggtgaaaaagcacgcccatgagctgatcggaagacaggaaacgaaacagctgatcgaccacttgaaagaatcttatcctgtactggtcgaagaggtctcgccgaatccgctgtctgtcggtgacattcagaaagtgctggcaaaacttctgaaagaaaaagtatcgatcaggaacttggtgacaatctttgaaacgctggccgactacggaaagctgacgacggattcagatatgctgaccgagtatgtcagacaggctctggccaagcagatcaccgcccaatatgcgaaggaaaatgagacgctgaaagtggtgacttgttcgggccgcgtcgaaaaggccgtggcggaaggaattcagcagactgaacacggcaactttttatctcttgaaccaacattatccgaaaatatcattcaatctgtagcaagagaaatcgaacagctctcattgaggcaggaagtgccgatccttctatgttcgccgcctgtcagaatgtatgtcaagcagctgcttgagcgctatttccctgatctgccggttctttcctataacgaattggaagccaatgtagaagttcaaagcatcggagtggtggatattcaatgaaaatcaaaaaatttgtagctggttctatgcaggaagccacaaagcaaattatacaggagctcgggaatgacgccgtaatcttgaattctaaaaaaattcaaaagagaaaatttctcggctttgtgaaaaaaaccggggttgaagtgatcgcggtcgtcgaccaggacttttccgacgcaaggaagcaagagcgtcaaaagcccgttttccgggaacaaagcccttcgcctgtcccgcagccggaccatcttgatttggcaagccaagtgaaagagctgaaagaactgctggaaatgcggcatcatgagcagcctgttgatgtgctgcctgaaccgctgaaaaaggcggaccagctcctggcaaagaaaggggtatcgccggccatccgtacgaaagcgctcggccggttgatcagcacttctttaagagacggcgaagagtggacggatgaaaagacgctggcgcacttaacagatgctttggccgatcttcttcccgataatctggaacaggacgtggcgattcattcgcaatatgtcgtgctcttcggatcgaccggagtcggcaaaacgacgacattggcaaagctcgccgcttcttctgtactggaaaagcagaaaaaaatcgcttttatcacgaccgatacgtacaggattgcagcggttgaacagctcaggacatatgccgagcttctgaatgcgccgcttgaggtgtgctacacgaaagaagagtttaaagctgcccagcaaaagttcgccgattttgaccacgtcttcattgatacggcgggccggaatttcaaagacgggcaatatgtcagggagctgaaggaaatcattccgtttgagcgtaagatacaggcgtttctcgtcatgtccgcgacgagcaagtacgaggatatgaaggagctcattaagcagttctcaagcattccgatcgatcagttgatattcacgaaagtggatgagaccgattcgttgggaagcgtcatgaatctgctcgccgaatcgagaatcggcctcggctatattacaaacggacaaaatgttccggaggatatccgctacttgtcaaacgcagcatttgtcagactgcttacggggtgttgaacatggatcaggcagaaagcttacgaaggcggatggggcaacgctttgccgaaccgcccgccgctatcgctcatccaaaagcgaaaacgctcgctgtcatgagcggaaaaggaggcgtcgggaagtcgaatgtatcgctgaatacggctctcgccattctggaaaaaggaaagagcgtgctgttgatcgatcttgatgtcggtatggggaacattgatattctgatcggccggcaatcgctctacacggtgatggacctcctccagcaaaaaatgccgtttgagcgcgccttgtcagccggcccgcgaggccttcaatacatttcgggcggaaccgggctggatgcaatgttcgaattgaacagggaaaactgggcgttttttctgaaggaattgacgcgggctttgacaagcttcgactatgtcatatttgacatgggagcggggctgtcaaaagatcagctgcctttcgtcctgtcagcggatgaaattctggtcgtcaccacgccggagccgacatccatcatggacgcatacagcgcgatcaagcatttggcattaaccggacgcgatcttcagctgaaagtcgttgtcaatcgctgtacaacccaaaaagacggaatttctgcttttctccgcctttccaacacggtaaacgcttttttgcagcaaaagcttgcatatgcagggccgattcctgaggatcccctggtctcaagagccgttgtggagcagcagccgtttctgataaagaatccgcgttccaagccgagcagggcggtttacctgctggccgaatcgctgcttcataacggcagaacggaaatgggcgaaaaccggtcctttatcgaaaaattatcttcattcctgaggaggggcaatacattatgattcgtgttcttgtcgttgacgactctgcttttatgagaaacatgatcaccaagtttttaacatccaatcacgagattgctgtagcaggaacggcaagaaacggcgaggaagcgctccaaaaaatcaaggagctccgtccggatgtgatcacattggatattgaaatgcctgtgatgaacggaaaagaaacgttgaaaaggattatggcgagcgatccgcttccggttgtcatggtatcgagcctgacgcagcagggagcagatatcacgatcgaatgtctggagcttggggcgatcgatttcgtcgcgaagccgtcgggttcgatttcaatagatttatataaagtaagagacatgctgattgagaaggttttgacagcaggacgggtgaaactgaaaggccggcaagttccgatctcaaagcccgccatcgagacggcgaagcagccgattgtgggcggcagcgattcagtccgctttcgggctggaaaacagctcatctgcatcggtacatcgacaggggggccgagggcgctgcaaagagtgcttcccaagcttcccaaaacgttgaaggcgcctgtttttatcgttcagcacatgccaaagggctttacggcctcattagcgaacaggctgaaccacctctcagaagtaaccgtgaaggaggctgaaaacggtgagagagcgaaagacggctgggtttacattgcacccggaggaaaaaacatggcggtcggccttgaaaagggcgaattggtgatcacgctcgatgaccgcgacacagaaagccgccacaagccttctgttgactacttgtttcaatccctggcctcacttcgggagtttgaaaaaatcgccgtcattatgacggggatgggaagcgacggaacagaaggcgtaaaaggccttttgaaacatgggagcggaacggtgatcgccgaagcagccgagtcgtccgtcgttttcggaatgccgaaatcggtcattaacaacgggcttgcaaacgacatcaagcatgttgatgagattgccgcagccattatgacgtatatgaaaaaagagagggcgtgactcatatggatatgaatcaatatttagacgtctttattgaagaaagcagagaacatttgcaaacctgtaacgaaaaattgctcgaactcgaaaaaaatccgacagacttgcagcttgtccatgatattttcagagcggctcataccttgaaagggatgagcgcaacgatgggctatgaagacatggctcatttaacgcacagtctggaaaacgtgctggatgcgattcgaaatgaagaaatgaccatcacgtcagagtggatggacgtcatgtttgaagcgctcgatgaccttgaagcaatcgtcctttcgatcatcgaaggcggcgacggcaaaagagatgtttccgaagtctgcgccaagcttgatgtgacaggggcaaacaaggaggcggcagcagcggcagaagcgcctgaagcggcgtcttccgaaacgaaatggtcctatgacgaatttcaacgaacggtcatcgccgaagctgaggaacaaggctttaaatgtttcgaaatcaaagttgcattgaaagaggactgtctgttgaagggcgttcgggtgtacatggtatttgagcagctgaacgaggtcggcgaagtcgttaaaacgattccggaaacagaagtccttgaatcggaggattttgattccgaattcgtcatctgctttttaagcaaacacggaaaagaagagattttcaacaaaatcaacggcgtatctgaaattgaaaaaatagaagtgaccgagctgaaaaacgatttttcggcacaagaagaagcgaagcccgccgcatccgaaaaagaaaccgcaccgaaagaggcggagaaaaaaccggctaagcagccggacggcaaaaaagacgcggcgaaacctgcggcaggcggcggaacgaagacgatccgcgtcaacatcgaccgcctcgattcattaatgaacctgtttgaagagctggtcattgacagggggcgcttagagcagatcgccaaagagctagaacacagcgaattaacggaaaccgtcgaacggatgactagaatttcaggcgacctgcagtcgatcatcctcaatatgagaatggttccggtagaaacggtgttcaaccgattcccgcgcatggtccgccagctgacaaaagaattaaataaaaagatcgagctgtcgattttcggagcggaaacagagcttgacagaacggtaatagacgaaatcggcgacccgcttgtccacctcttgagaaacagccttgatcacgggatcgaggcgcctgaagtcagggtgaaaaacggtaaacctgaaaccggtcaagtccgcctgaaagcataccacagcggtaaccatgtctttatcgaggtggaggatgacggcgccggcatcaaccgcaaaaaggtgctcgaaaaagcgcttgagcgcaacgtcattactgaacgcgaagccgaaacgatcgaagatcatgaaatcgacgcgctcatttttgcgccgggattctcaaccgcagatcaaatctcggatatttcaggacgcggagtcggcttagacgttgtcaaaagcaagctggaatcgttgggcggttctgtcagcatcaaatcgagcgaaggcgaaggttcgcttttctccatccagcttccgcttacactgtcgatcatttccgtgctgttagtcaaacttgaaaatgaaacgtttgcgattccgatttcttctattatagaaacggctgtcatcgataagaaagatattcttcaaacgcacgaccgcgaagtgatcgatttcaggggccatatcgtaccggtggtttacctgaaagaacagtttaatgttgaggattcttcagatgatcttgatcagcttcacgtcatcgtcgtgaaaaaaggagacaagctgacggcatttgttgtcgactcctttatcggccagcaggaagtcgtattaaaatcactcggcgattatttaacaaacgtctttgccatttccggcgcgacgattttgggagacggacaagtagccctgatcatcgactgcaacgcccttattaaatagaaagcgaaaggagagcgatcctcttgaccacacagactaccaccggtgagaaaatgattgtgttcaaagtaaatcataaagagtatgccatctctgtatcagaagtaatgtccattgaaaaatggcagcagccaacaagggtgccgggagtggaaccgtatatttgcggcgtcattaatttgagaggtgttgtcacacctgtcatcgatttaagaaagcggattgaagcgcctggagacacgattactgatgaaacgagaatcatcatcatcacccatcaggacattgaagtcggctgggtggtggatgaggcgaacgatgtcatcacagtcgaggaagaggaaattgaatcggctcccgaaacggtaggaaaagacggcaggcaatggattaaaggcatcgtcaagcaagggtccagacttctcaatctgattgactctgaagctgttttaaaccggaagtcgagccttgccgccgcttctgaaaatgtgaagaaataaggagccaatgatgagcgtatttaacggaattagagaagagcatcttgatatattgcgggaagtcgggaatatcggagcgggccattccgcttccgccctggccctgttgctgaacaggaaaatcgaaatggaagtgccgtttgtcaagctgatgtcgtttgatgagcttgtcaacctattcggcggtgcagatcttcctgtcgcaagcatctttttgcgcatggaaggggattttccaggttctatgttcgtgatcatgcctttttcagaggccgagcagctgatcagggagcttgtcggcaatccggaattcgagattgacagcatgacgccgaacgatatcggagcctctgccctgcacgaactcggaaacattatggcgggatcttatttgaccgctctcgctgatttgacaaaccggcaaatgtacccgagcgtcccagaactgacgctagatatgttcggagccgtcatcagcgaagggctgatcgagctcagccaagtcggagatcaagttatcgtgatcgacaactccatttttgacgaggagcacaaccggaaagttaaagcgcatttgttccttctgccggactatgattcttttgaaaagctctttcatgcattgggtgcagcgctatgaaaatcttagaaaaagaaacatcgattatcagagtgggaattgccgatgtaaaaatcgtccgcactcccgacaagatcagaacatcgggtctcggttcgtgcgtcgggctcgtgctgtatgatttggaagcaaagacggccggtctcgtccacgtcatgcttccggactcttccttatccaagacgccggacatcaacgtggcaaaatacgcggacacagccgtcgaagcgacggtcaagatgctgcttgaagccggatgccgaaaatacgctttgaaagcgaaaatggccggaggagccgaaatgtttaaatttaagatgacaaatgatttgatgaaagtcgggccaagaaatgtgcttgcgattaaaaaacatctatctctcttaaacattccgattgtaagcgaggatacaggcggaaacagcggaaggacgatcgagttcgatccgcaatcagctgaacttgtcatccggacagttaaacaaggtgtaacaacgatttaataagcaatatagggggataaagatgcaatccttgaactatgaagatcagatgctttggtcgcggtggaaagaatggaaagatcctcaggcaggcgatgatttaatccgccgctatatgccgcttgtgacatatcatgtcggccggatagccgtcggcttgcccaagtccgttcataaagacgatttggtcagccttggcatgctgggtttgtatgatgcccttgaaaaatttgatccgggaagggtatttgaagtttgatacatacgcttccttcagaatcagaggcgctatcatcgacggtcttcgcaaagaagactggcttccgagaacgtcccgtgaaaaaacgaagaaagtggaagcagcgatcgaaaagctcgaacagcgttacttaagaaatgtttcgccgagcgaaatcgcagctgagctgggaatgagcgaacaagacgtcgtgaccacaatcaatgaaggtttctttgcgaacctcctttcaattgatgagaagcttcacgaccatgaagacggggagaacgtccaggtgatgataagggacgacaaaacgagcacgcctgaagaaaaaatgctcaaagacgaactgatctcccagcttgcggaaaaaataaacgagctatcagaaaaagagcagctcgtgatcagcttattctataaagaagagctgacgctgacggaaatcggacaggttttgaatttgtcgacttcccgtatttcacagattcactccaaggcgcttttgaaattgaagcatctgctggataaagtggtacaatagcatgtaagctgccggcatgaaaccggcagcattttttaagcgtccgacgggaagtctttttttgattaaatttcatggttagcgagtgaaaaatatgtcaacaatattatggcttgtgagcttcacgctccacggtatattgatttatttcgtcatcattttgaatacgaggctcagcgctttcaaggcagcggagaaagagcaaaaacagcttttggaagaaaccgagaatacattgaccgcttttttgatggagttaaaagacgaaaatgaaaaactcgttcaagagattcgggcgaatgccgaaaaagagccgcaaagaccggaaacacagcctgaaattcccgctcaaacccccgtccttccggaagcggacgaatcgcgcgatctgccgcttcacatcgaagcgatgatcaatgaggtggagcaggaagaggatgagctcaatcaaaaggagcaggaagcatccatatcctatgaagaagaagctctcgcattatatgaaaaggggctctctccggaggaaatcgcaagacagctgaaaagcgggaaaacagaaatcgagcttttcttaaaatttcgcggaaagctcaaaaacgattcttgattgtcgagaaagcttatgttatattatttcttggtgttaattacacacgcttaacgatttatgcaagcggtgctgtgcgattctcgcgtgcagtcctgcataaaaatgacctaagcggaggaaaaaaaccattatattaggaggaaataacacatgtcagtcatttctatgaagcaattgcttgaagctggtgttcacttcggccaccaaacgcgccgctggaacccaaaaatgaagcgttacatcttcacggagcgtaacggaatctacatcatcgatcttcaaaaaacagtcaaaaaagttgaagaagcatacaacttcacgaaaaaccttgcagctgacggaggaaaaatccttttcgtcggtacgaaaaagcaagctcaagactctgttaaagaagaagcggaacgttctggaatgtactatgtcaaccaacgctggcttggcggtacattaacaaactttgaaacgatccaaaagcgtatcaaacgccttaaagatatcgaaaaaatgcaggaaaacggcacatttgacgtacttcctaaaaaagaagtcgttcaattgaaaaaagaattagagcgtcttgaaaaattcctcggcggaatcaaagaaatgaaagagcttcctgacgcactgttcattatcgatcctcgcaaagagcgcatcgcggttgcagaagcgcgcaaactgaacattccgatcatcggaatcgttgacacaaactgcgatcctgatgaaatcgatgttgtcatccctgcgaacgatgacgccatccgcgctgttaaattgctgacttctaaaatggcagatgccatccttgaagcaaaacaaggtgaagaatcagctgaaacagaagcgaaagaagcagaaacaactgaaacaacaactgcttaacctggtcaaaaggtgataagggggtctgccttttatcaccttttttttcaccagatcaacatttacatattttgtttgatatataaggaggaaatcaaaaatggcaattactgcacaaatggtaaaagagcttcgcgaaaaaactggcgcaggcatgatggactgcaagaaagcgttaactgaaactgacggcaacatggataaagcgatcgatcttctaagagaaaaaggaatcgcaaaggctgccaaaaaagctgaccgcatcgcggctgaaggtttgactttgatcaaaaccgacggcaacacaggcgttattcttgaagtgaactctgaaacggacttcgttgcgaaaaacgaaggcttcaaggagcttttgaacgacctggctgaccacattctggctgaaaagcctgaaagcgttgaagctgctatgggtcaaaaaatggctaacggttcaactgtagaagaatacatcacaagcgcggttgctaaaatcggagaaaaaatcacgcttcgccgcttcgctgtcctgacaaaaggcgatgacgctgcattcggcgcatacctgcacatgggcggaaaaatcggcgtattgactgtccttaacggcacaactgacgaagaaacagcaagagacatcgcaatgcacgttgcagctgtaaaccctcgcttcatttcccgcgaccaagtgtcagaagaagaagcgaaccgcgagcgcgaaatcttgactcagcaggcgcttcaagaaggcaagcctgaaaacatcgtcgcaaaaatggttgaaggccgcctgaacaaatatttcgaagaaatctgcctgcttgatcaagcgttcgttaaaaacccggatgaaaaagtgaaacaggtcgttgctgcgaaaaacgcaacggttgaaacgttcgtccgctacgaagttggagaaggtatcgaaaaacgccaagaaaactttgctgaagaagttatgaaccaagtgaaaaaataagattgaaaagccgcttgccataaaacacacggcaggatcttttcaaggaaaataggggacacaatttgtgtccctatttttaaaacagtttacaaacctttttttctcttgcataataaataacggcaagcatgcacttggaggttattatggaaaaaccaaagtataatcgtatcgtattaaagcttagcggagaagcccttgcgggtgaacagggaaacggcatcaacccgaccgtgatccagtccatcgccaaacaggtgaaagaaatcgccgagcttgatgttgaagtggcggtcgtcgtcggcggcggcaacctgtggcgcggaaaaacgggcagcgatctcggaatggaccgcgcaacagcggactacatgggaatgcttgcaacggttatgaattcccttgcgctgcaagacagccttgaaacgctcgggattcagtcaagagttcagacatccatcgaaatgaggcaggtcgctgagccatacataagaagaaaagcgattcgccatcttgaaaagaagcgcgtcgttatcttcgctgccggtacaggcaatccatacttctcaacggatacgacagcagcgctcagagcggctgaaatcgaagccgacgtcatcttaatggccaaaaataatgtcgacggtgtatacaatgccgatcctagaactgacgaaacagccgtaaaatatgaaaaattgtcttatctcgatgtgttgaaagacggtttggctgtcatggattcaaccgcttcttcactttgcatggataacgacatcccgctgatcgtcttttctattatggaagaaggaaatattaaaagagccgttttaggcgaacaaatcggtacaatcgtaagggggaaataacgtgtcaactcaagtgatgaatgaaacaaaagaacggatgcaaaaagcgataagcgcttatcagcgcgaattggccactgtccgcgcaggacgtgcaaatccgtcattgctggacaaagtggcagttgagtattacggagcgcagacgcctttaaaccagattgcgtccattacagttccagaagcgcgcatgctcgtcatcacaccatatgacaaaacggcgctcggcgatatcgaaaaagcgattcaaaaagccgacctcggtgtaactccgtcaaacgacggcaatatcatccggatcacgatccctcctctaactgaggagcgcagaaaagagcttgccaaactcgtgaaaaaatattcggaagatgccaaagtcgcggtccgcaacatccgccgcgatgcaaatgacgatctgaaaaaactagagaaaaatggtgaaatgactgaggatgaattgcgctcttcaacggaagacgtacaaaagctgacagatgaatatgtgtcaaaaattgatgagatcacaaaagataaagagaaagaaatcatggaagtttaatgaaaaactctgtacaatagataatagtgaaaagaccctctcatgtttacagggggtttttttgttaatactgttgttatctagaacgatataacaggaaagcaaccttttgggtgatggaggactctcatgctcaatatactcaaaaattggaagaatcagcattcggctgcttccaacatggaatgttacacaaaagaaaatattttaaaaggagaaattcctgaacatatcgccattattatggacggaaacggccgctgggcaaagaagcgggcgatgccccgcatcgcgggtcatcacgaaggcatgaaagtggtcagacagacgacaaagcttgccaatgagctcggtgtcaaagcgttgacgctgtatgccttttcgacggaaaattggaagcgtccaaagcttgaggttgactttctgatgaagctgcctgaagagtttctgggaacgtatctcccggagctggtcgaagaaaatgtccgggtccgcatgacaggcgatagggaaggactgccgccccacacgatccgcgcggttgaaaaagccatccgtgatacggagaacaatgatggacttattcttaattttgcattgaattacgggggacgtgcagaaatcgtcagagccgcaaagaaaattgccgaagaagccaaaaaaggcacattgaataccgaggaaatcgacgaaaagctattttccgattatttaatgacagaaactttgcaggaccctgatttgctgattcgcacaagcggcgagatcaggctgagcaacttcatgctttggcagcttgcctacagcgaatttttatttaccgatgtattgtggcctgattttaaagacgttcacttgcttcaggctatcggagaatatcagcgtcgcgggagaaggtttggcggaatttagaggatggtgcagatgaaacagagaatattgacgggtgtgatcgcggcagcggtttttctgccgctcgtgattttcggcgagctgccgttcgccctgctagtttatgcaataggtatacttgctctatttgaacttttaagaatgaaaggcctgaagctgatcagcgctccgggtatcatcagcatgctgctgttggcggttttgctgtgtccaagccaatacgcggaagacgctgggctgggtataaccaaaggggaggtcgtctttttggcggtccttttgcttttggcatatacggtgctcagcaaaaactcgtttacttttgacgaagcggcattcgtggcgctggcagcagtttatatcggattcgggttttattactttattgaaatcagaaacatcggactcagctatgtcttttttgcgatcggcgtcgtctggtcaacagattccggcgcttattttatcggaaaggcgtttggaaagcggaagctctggcctgaaatcagccctaacaaaacggtagaaggcttttggggcggaattttgacagcggtcgttttttccgcgatttatcaggccgccacaggttttccgcacgcttatctgtttgtgctgatcattaccgtgcttttgtcaatcgtcggtcagatcggcgatttggccgagtctgcgttcaaaaggcattaccaggtgaaagactcgggccggatcctcccgggacacggcggaatgctggaccgctttgacagctttttatttgtcatgccggttctgtacttcctgcttgttctttttcagccgttcgggctatgatagaaaagggtactgatagctagaaagaaacagaggtgcggcaattttgaagaacatatgtctattgggagcgacaggctccataggagaacagacgcttgatgtcatcaaagcgcatgacgataagtttcggctgaccgccatgactttcggcaaaaacgccgaaaaagcggcagaaatcattgaaacctttaaaccgaagtatgtaggcgttggggatgagcatacatatgaaacattaaaacagcattctttctcctacacctttaaaacagggatcggggaggaagctttaatcgaagcggccgttatcccggaagcggatatcgtcgtcaatgctctcgtcggcagcgtcggtcttcttccgactttaaaggcgatggagcataaaaaaacaattgcgcttgcaaataaggaaactctcgtgacagccggtcatatagtgaaagaacacgcccaaaaatacgatgtcccgctcctgcccgtcgacagcgaacattccgcgattttccaggcccttcagggggaaaatccgaagcatatcaaacggctgatcgtcacggcttcaggcggcagcttcagggacagaacaaggcgggaacttgaaggcgtcacagtggaagaagccctcaatcatccaaattggtcgatgggtgcaaaaatcacgatcgattcggctacaatgatgaataaaggactcgaggttattgaagcccactggctgtttgatctgccctatgaccagatcgatgtcctccttcacaaagaaagcattattcattcaatggttgaattccacgaccgcagcgtcatcgcccagcttggcacacctgatatgagagtgccgattcaatatgcgctcagccatccggaacgcctgccgtttaatgaagcaaaatccctcgatctctgggaagtcggacagctgaattttgcccaagctgattttgaaaggttccgctgcttacaattcgcttatgaatcaggtaaaataggcggtacaatgccgactgttttaaacgcggccaacgaggaagccgttgcggcatttctttcgggcaggatttcctttctcggaatagaagacatcattgaaaaggctttggaacgccatcaggtgatcgcaaagccgagccttcaagagatccgtgaagtggacaaagacgccagaaagtttgtccaaacattactcacataaggtggtatgttcgtgaatactgtgatcgcgtttattcttatttttggaacgctcgtatttttccatgagcttggtcatctcatccttgctcaaagagccggaatactgtgccgggagtttgctatcggcttcggtccgaaaatcttttcgtttaagaaaaatgagaccgtttatacgatcaggcttcttccgatcggcggctttgtcagaatggccggcgaagatcctgagatgattgaagtgaagcccggttatacggtcgggctgttgttcgacagcgaaaacaaggtcgaaaagatcattatcaaccaaaaagaaaagtatcccgacgcattggtcattgaagtggagcaggccgacctggagcaccagatgaggattacgggctatgagcacggcaatgaagatcatctctcttcattttctgtcagtgaaacgtcctttttcatcgtagacggggaagaagtccagatcgctccttacaaccgccaatttcattcgaaaacggtttggcagcgcatcaaagcgattgctgccggaccgatcatgaactttattttggcttatgtcatactcgtgatgctcggactgatgcagggagtgccgtctgacgagccggtgctcggcaagttgatagacaacggacgggcggcggaagcaggcctccaggagggagaccgcattcaaacgatcaacggggagaacatgaggtcgtggacggatattgtcaacacggtcagagaacaccctgaaaaagaactgaaaatcgttttgatgcgcgacaatgtcaagctgacgaaatacgtaacacctgaagctgtcaaggcaggggatgaaaccgtcggcagattcggcgcttacaatcctgtgaaaacaggcgttctgacatcgatttcctacggtgcgaccgaaacggcgacagtggcccagagcatcgtcaccaatctcggaaagctcgtcacaggacaattctcaatcgacatgctggccggtcctgtcggcatttatgacatgacagaccaagtggccaggacaggcgttatcaacctgctgaagctggccgcatttttaagcatcaacctcgggatcgtcaaccttctgccaatccctgcgctggacggcggaagactgttgttcctgtttattgaagcgatccgcgggaagccgatcaaccgcgaaaaagaagcgtttgtcgtctttatcggcgtcgcatttttgatgctcctaatgcttgtcgtcacatggaacgatatccagcgcttatttctgtaaaaccaatcgccttttttaagtgcagccaagccttttaaaaggctcttttttagggacaccgttcccgactcaaaaaagtaaccaactgaaacaaatgaggtgcgaatgaatgagacagagcaggactttaattcctacgctccgcgaagtgccggctgatgctgaagcgaaaagccatcagcttcttctcagagcagggtttatcagacaaaacacaagcggtgtatacagctatatgcctcttgccaataaagtcattcataaaatccagagcattgtccgcgaagaaatggagaaaatcaatgccgtcgaaatgctgatgccggcgctccagcaggcggaaacttggcaggaatcgggaagatggtatacgtacggtcctgagctcatgaggctgaaagaccgccacggccgtgaatttgccctaggcgcaacacacgaagaggtcatcacaagcatcgtcagagatgaagtgaaatcgtacaagcgccttccgctgaccctttaccagatccaatcgaagttccgcgatgaaaagcgcccgcgcttcggtctgttgagaggccgggaattcatcatgaaggatgcgtattccttccattcctccgccgaaagccttgatgaaacgtacaatgatatgtatcaggcgtatacgaatgtgtttacgcgctgcggcctgaatttcagaccggtcattgcagactcaggcgcgatgggcggaaaggatacccatgaatttatggcattgtccgatgtcggtgaggatacaattgcgtattctgatcagtcttcatacgccgccaacattgaaatggctgaagtgaaggaaacagatgccggcgagcaggcagaaatgaaagagctgcaggaagtccacacaccttcggtcaaaacgatcgaagaggttgccgcatttcttggcatatccccgtcagactgcattaaatcaatgctgatgaaagcagacggacgttttgtcctcgtcttgacgagaggggatcacgaagtcaatgatgttaaggtgaaaaacctgcttcaagcagaaataatcgaattcgcgagcgccgaagaggttgcagagataacaggcactgaacccggttttgtcggaccggtggggctcgaccgcgaaatcgaaatctttgcagactttgctgtgaaggcgatggcaaacgcagcagctggagcgaataaaacagattaccattatcaaaacgtgaatatcagccgggatgcgcacaatgtgacattcgccgatctccgctttatccaggaaggagacccttcaccggatggaaaaggaacgatccgttttgcaaaaggaatcgaagtcggacaagtctttaagctcggcacccgctattctgaagcgatggacgccacataccttgatgaaaacggacgcgctcagccgatgctgatgggctgctatggaatcgggatttcccggacgctttcggccatcgttgagcagcatcatgacgataaaggcttgatctggccgctggaagtgacgccgtatgacctgcatatcctcgcgcttaatatgaaaaatgacgcgcaagttcagcttgccgaaaagctgtatgaagaatttaaagcgaacggctatgacgtactgtttgatgaccgtgccgaacgggccggcgttaaatttgcagattccgatttgatcggtctgccgatccgcatcacggtcggaaaaagagctgacgaaggcgttgtcgaagtgaagatccgcaaaaccggagaatcctttgaaatcgctgctgatgagctgtttgactttatcgaaaaacaagtcaagagcttatcttctcactcttaaaacatggtaaactagagtaaaggaaggtacctcgggaatcgtcccaaggtaccttcaattatgattttcttttagggaggaatctgtcttggaagaccagctttctgtcaacagaagacagtttcaaattcttctgcagcagctgaatgtaacggaagatacgatgatccgccaccttgaaggcggacaaatcataaagctgaccgttcataaaaacaagaagacatggcactttcactttaaattgagaaatgtgctgccttatcaaatcttcgaacggtttcacagccagctgacccgcaccttttcccatatcgcccaggtcacctgttccatcgaggcggaaaacccttcgattgacgagcagcttgttcaggattactggacgcgctgcattcaggaactcgatggtatttctccgccgatcttggcgcttttgaacgaccaaaagcccaagcttacgggaaacaaaatcctgcttaaaacgaaaacagatacagaagcgtccgctttaaaaaagaaatacagctcgctcatccagtcaagctaccgcacattcggctttcctgagctccagctggacacagaaatttttgtatcagatcaagagattcagaaattcagagagcaaaaaatggccgaagatcaagagagggcccttcaggctttaatcgaaatggagaagcaggataaggaagcacaagacgatgaagcgccggcaggccctcttcagatcggctaccagattaaagactctgaagaaatcagaacgcttgacagcatcatggatgaagagcggagaattacggtgcaaggctatgtattcgacgctgaaacaagagagctgaaaagcggcagaacgctttgcatctttaaaataaccgactatacaaacagcattctcgtcaaaatgttcgcccgcgaaaaagaagacgctgtattgatgaagtccctgaaaaaagggatgtgggtcaaggcgagaggaagcatacaaaacgatacattcgtccgcgatttggtgatgatcgccaacgatgtcaatgaaatcaaagcgaaaacccgtgaggatacagcgccagaggacgaaaaacgagtcgagctccacctccattcaccaatgagccagatggatgccgtatcaagcatcggcaagcttgtcgaacaggcgaaaaaatgggggcacccggctatcgcgctcactgaccatgccgtagtccaatcgtttccggatgcattcgcggcaagcaaaaagcatggcgtgaaaatgatctacggacttgaagccaacctcgtcgacgacggcgtgccgattgcctacaatcccgtgcaccgtctgcttgaagaggaaacatatgtcgtgttcgacgtcgagacgacggggctgtctgccgtctatgatacaatcatcgagctggccgccgttaaagtaaaaggcggggaaatcatcgaacgctttgaaaggtttgccaacccgcatcgacctttatcggctacgatcatcgagctgacggggattaccgatgatatgctgaaagatgcgcccgaagtcgaagaggtcatccgcgattttaaagaatgggtcggtgatcacacgcttgtcgctcacaatgcaagctttgacatcggcttcatcaatgtcgcctataagcgcctgctgaattcggagaaagtgcagaacccggtcattgacacgcttgagctgggccgttttctttatccggaattcaaaaaccacaggctgaatacgctttgtaaaaagtttgacatcgagctcacccagcatcacagggcgatttatgataccgaagcgacgggttatctccttgtgaaaatgctgaaagatgcggccgaaaaaaatatcctgtaccacgatcagctgaatgaaaatatggggcagtccaatgcctatcagcgttcaaggccatatcacgcgacacttttggcggttaatgagacaggcttgaaaaaccttttcaaacttgtttcgctgtcgcatatccattatttttacagggtgccgaggatcccaaggtcacagcttgaaaagtacagagaagggcttttaatcggttcggcgtgcgacaaaggcgaagtatttgaaggcatgatgcagaaatcgccggaagaagttgaagacatcgcttcattttatgactaccttgaagtcatgccgcctgaagtctaccggcacctgcttcagctcgaactcgtcagggatgaaaaagcgttaaaagaaatcatcgccaacatcacaaagctcggcgagaagctgaatatcccagtagtagcaactggaaatgtccattatctgaaccctgaggacaaaatttaccggaagattctagtttcctcgcaaggcggcgcaaatccgctcaacaggcacgagctgccgaacgttcatttccgttcgacggatgaaatgcttgaggccttttcatttttgggtgaggaaaaagcgaaagaaatcgttgtcaagaacacccgcatgatcagcgagcgaatcgaagaaatcaagccgatcaaagacgatctttacacaccgaagatcgaaggcgcagatgacgaaatccgccgcatgagctatgagaaagcaagaagcatttacggcgaggacctgcccgaaatcgtcgaaaaacggatcgaaaaagagctgaaaagcataatcggccacggattcgccgtcatctatctgatctctcataagcttgtaaaacgctcccttgatgacggctatctcgtcggttcgaggggatcggtcggttcttcccttgtcgcaacattgacggaaattaccgaggtcaacccgctgccgccgcattacgtctgtccggattgccgccattccgagtttttcaacgacggatcggtcggttcgggatttgatttgcctgacaaagactgtccgaagtgcggagcggcctacagaaaagacggccacgacattccgtttgagacgttcctggggtttaaaggggacaaggttcctgatatcgacttgaacttctcgggcgaataccagccgcatgcccacaactatacgaaagtcctgttcggagaggataacgtctaccgtgcgggaacgatcggaacagtcgccgaaaaaacggcttacgggtatgtcaaagggtatgcaaacgacaacaatttgcatatgcgcggggcggaaatcgaccgacttgtccaaggctgtacaggcgtcaagcggactacagggcagcacccgggcggaattatcgttgtgccggattatatggatatttacgacttttcaccaatccagtttccggcggatgccacagattccgaatggaagacgacgcattttgacttccattccatccatgacaaccttctgaagcttgatattctcggacacgatgatccgacggtcatccgtatgctccaggatcttagcgggattgatccgaaaacgattccgaccgatgatcctgaagtgatgaaaattttccaagggacagagtctttaggggtaaccgaggaacagatcggctgtaaaaccggtacactcggcatccctgaattcggaacccgctttgtcagacagatgcttgaggacaccaagccgacgacattttccgagctcgtacagatttccggcctgtcacacggtacggacgtatggctcggcaacgcgcaggagctgattcacaacaatatttgtgaactgagcgaagtgatcggctgccgtgatgacattatggtgtacttaatctaccaggggcttgagccatccctcgcctttaagattatggagtttgtccgtaaaggaaagggactgacgcctgagtgggaagaagaaatgaagaataataatgttccggactggtatatcgattcctgcaaaaaaatcaaatacatgttcccgaaagcccacgctgcggcatatgttttgatggcggtcaggatcgcttattttaaagtccatcatccgctgctctactacgcagcatacttcaccgtgcgggccgacgactttgacatcgaaacgatgatcaaaggatcgacagcgatcagagccgtcatggatgatatcaactctaaaggccttgacgcttctccaaaagagaaaagtttgctcacggtgcttgagctggcgcttgaaatgtgcgaaaggggcttctctttccaaaaagtcgatttatacagatcgagcgcttcagaattcatcattgatggaaacagcttgattccgccgtttaattcaataccggggcttggaacaaacgccgccttgaatattgtcaaagcgagggaagaaggcgaatttctttccaaagaagatttgcaaaaaagaggaaaggtgtcaaaaacgatcatggaatacttggagcgccacggctgtctcgagtcgcttccagatcagaaccagctgtcattattctagaaactgcctgcttaaagcaggcagtttttttatctgttttacggcataaagagcgttttttcggaattgggtgacaaatgccaggggagaaatgatcacaaaaaaataaagggctgtcagatctgttgacaataaataaacatcaatgttagaatttccaaaatataacacttcgtttggaatgtgctgtctattagatttctactctcataacttagtttattgaacaaataaactaagttacttatcaaattcctcgcttgcagtcgtgtgctgatttaatgtgcaatcaatatcttcggtttttcaactttggccttgttttgttcgccggcaaatctaaaaggaggtgagcatgttgtagacagatggagttgcttgatcttaacgaacatgatggggaggaagcagtacgtgaaacagaaagtatttttaaaaatgaaagcgctttgtttggcacttttagtgatcttctctatgagcatagcgtcgttttcagaaaagacccgtgcagcttctgctgaagaatatcctcataattatgctgaactgctgcaaaagtctttgttattttatgaagcacagcgctcgggaagacttccggaaaacagccggctgaattggagaggagactccgggcttgaggacggaaaagacgttggcctcgatttaacgggagggtggtatgatgccggcgaccacgtgaagttcggtctgccgatggcttattctgccgcaatcctgtcatggtcggtctatgagtaccgagatgcctacaaagaatcgggtcagcttgatgcggcgctggacaatattaaatgggcgacagactactttcttaaagcccatacggctccttatgaattgtggggccaagtcggaaatggcgctctagaccacgcatggtgggggccggccgaagtaatgccgatgaagcgccctgcctataagatcgatgccggctgtccggggtcagaccttgctggtggtacagccgcagcgctagcatcagcatcaattattttcaagccgacagattcttcttactctgaaaaattactggctcatgccaagcaattgtatgattttgccgaccgctaccgcggcaaatattcagactgcattacagacgcacagcaatattataattcgtggagcgggtataaagatgaactgacatggggagctgtctggctctacttggcaacagaagaacaacaatatttggataaagcccttgcttcggtctcagattggggcgatcccgcaaactggccttaccgctggacgctttcctgggatgacgtcacttacggagcacagctgctgctcgctcgtctgacaaacgattcccgttttgtcaaatctgtcgaacgcaatcttgattattggtcgacaggctacagtcataatggaagcatagaacggatcacgtatacgccgggcggtttggcctggcttgagcagtggggatcattgcgatacgcttcgaatgccgcttttctcgctttcgtttattccgattgggtggatacagaaaaagcgaaaagatatcgggattttgctgttcggcaaacggagtatatgctaggagataatccgcagcagcgaagctttgtcgttggatacggtaaaaatccgccgaaacatccgcatcaccgtacagcacacggttcatgggccaatcagatgaatgtgcctgaaaaccatcgccataccctatacggcgcattagtcggcggtccgggaagggacgattcgtaccgagatgacataacagattatgcgtcaaacgaagttgcgatcgattataatgccgcttttaccggcaacgtagcgaaaatgtttcagctgttcgggaaaggccatgttccgctgcctgattttccggagaaggaaacacctgaggacgaatattttgcagaggcatcaatcaacagctccggaaacagctatactgaaatccgggcgcagctcaataaccgttcgggatggccggcaaagaaaaccgatcaattgtctttccgctactacgttgacttgacggaagctgtagaagcgggatattccgccgaagatataaaagtcacagccggctataacgaaggggcctcggtatcagagctgaagccgcatgacgcttcaaagcacatttactatacagaagtcagcttcagcggggttttgatttatccaggcggtcaatccgcccataaaaaagaagtgcagttccgcctttcggcaccagacggaacgtctttttggaacccggaaaatgaccactcttatcagggtctgtcacatgcgcttctgaagacgcggtatattcctgtttatgatgatggacggctcgttttcggacatgagcccggttactagatattgaacttcaagaggaggaacatcatggataataaaacacgttttatgcagctgtatgagcaaattaaaaatccgaacaacggttatttctcacccgaaggaattccctatcactcggttgaaacgctcatatgtgaggcgcccgactacggtcatatgacgacatctgaagcgtacagctattggctgtggcttgaagcgatgtatggccggtacacacaggactggtcaaagctagaagccgcctgggacaatatggagaaatatattatcccggtcaatgaaggagacggaaacgaagaacagccgaccatgaactactacaacccctcaagtccagccacttatgctgcagaacacccctacccagatctgtacccttcagcgctgaccggacagtatccggcaggaaatgacccgctcgatgccgagcttaaagcgacatatggaagcaacgaaacgtatttaatgcattggctgttagatgttgacaactggtatggcttcggaaatcttctgaacccttcgcacactgccgtttatgtgaacacttaccagcggggcgaacaggaatccgtttgggaaacggttccgcatccgtctcaggataatcagacgttcggaaaaccgaatgaaggtttcatgagcctttttacaaaagaaaatcaggctccagcaccgcaatggcgctacaccaatgcaacggatgcagatgcgcgcgccgttcaggcgatgttctgggccaggcaatggggctacagcaatactaattatttagaaaaagctaaaaaaatgggggactttctccgttacggcatgtatgacaaatactttcaagagattggaagtgccgctgacggctcgccttcccgcggtgctggaaaaaatgcatgtcattatttaatggcgtggtacaccgcttggggaggcggattgggacagtatgcaaactgggcgtggcggatcggtgcgagccatgtgcatcaaggttatcaaaaccctgttgcctcttatgcactgtcaacggctgaaggcggattgattccaaattcatccacagcgcgaagcgattgggaaaaggcgctgaaaaggcagctagaactttacacatggctgctttcttcagaaggagccgttgccggcggcgccacgaacagctggaacggcaactacagcgcatatccgcagaatgtcagcacattttacgaaatggcctacacagaagcgcctgtatatcacgatcccccttctaacaattggttcgggatgcaagtctggccgctggaaagggtggcggaactgtattatattttcgcagagaaaggtgacaaatcgtctgaaaacttccacatggcaaagcatgtgattgaaaaatggatcgcatattcacttgattatgtgtttgtgggcgaacggccggttactgacgaagaaggctattatttaaatgatgcgggagaacgcgtccttggcggccaaaacccgcagatcgccgtacaatccgacccaggcgagttttggattccggcaaaccttgaatggagcggccagcctgatccgtggaagggatttgattcatttaccggaaatccgggactgcatgtcacgacgaagaatccttctcaagatgtcggcgttctcggcagctatattaaaacgctcgtcttctttgcggccggaacaaaagccgaaaccggcggctttaccgctcttggaaacaaagccaaaaatctggaaaaagaactgcttgatgcagcatggagtaaaaatgacggaatcggtatcgcagcagaggaagaacatgaagattatatccgctactttacgaaggaaatctactttccgaatggctggagcggcagaaacgggcagggcaataccatccctggccccaacactgtgccgtctgatccggcaaaaggcggtaacggcgtctatatcagtcatgcggagctccggccgaaaattaaaaatgatccgatgtggccttatttggaaaacaaatatcagacctcgtggaatccgaatacgggcaaatgggaaaacggactgccgacctttgtatatcaccgtttctggtctcaggtcgatatggcgacagcttatgctgagtatgaccgtttaatcggaaatgcataacaatcaataggagaatattagatgcgcttggccgtttgggcaaaggcggcgttcagccgccttcttttttaaaggcaggatttaggattttagcgagtgttttacacgattatctaaaaaggagatcaaaagtttgagagaaaaatggttagccttatgtttaaagtcgatcattctgttcgttttgatcatgggaaccgttcttttatccgcagttccgaaagcttcgggaacaagcgggccagcaaagcaagaaaagcagagcatcatcaccccggctgatcttttggaaaacatgagccctggatggaaccttggcaacacgctggatgctgttccgacagaaggctcttggaacaatccgccggttcgcgagcatacttttgatgatattcgcgatgcggggtttaaaagcgtccggattccggtgacatgggattcccacatcggcagcgctccagagtatccgatcgataccgattggatgaaccgggtagaagaagtgacagattgggctttggaaagagagttttacgtcgtgttaaatattcaccacgattcttggctatggatcagccggatgggaaacagccagcaggagacattagataagctggggaaagtctggaagcagattgccgagcgcttcaaaaacaaaagtgaacgcctcctgtttgaaattgtcaatgagccgaccggaatgagcgcatatcaaatgaatctgcttaaccgagagatgctgaacatcatccgttcgaccggcggcaaaaacggccagcggctcgtaatcgtcggggggcttgaagataacaaagatgaattgcttcattcatttgaaccgcctgatgatgaccggattgtcctcacatatcactactattctccttgggattacgtatcaaactggtggggccggacgacttggggatcggcagccgaaatctccgagatggaggaggatatcaaaccggtttatgaaaaatttgtaagggaaggatacccggttatcatcggtgaatacggtaccctcggcgccaatgaaaagcattcaaaatggctctatcatgatacgtttgtccgccttgcccacaaatatcaaatggtcccgatgtggtgggacaacgggaatgaccagtttgaccgggctgagagacagtggcgtgatcctgttgttaaagagattgtcattcaggcgggacgcggcgttcccaatgcgatcatcaaaccggcagatctttttatcaaaaaaggtcaaagcatcagcgatcagacggtggacattcagctgaacggcaatgtgctgactggcatttatcagaaatctgaaccattaaaggaaggcagtgattatacagttgacaatgccggaaaaacggtctctattaaggcatcctgcttggcaaagctgctgaacggggcggggcagcctggggtaaaagcgcagctcacttttacgtttcataaaggagccagccaggttatggatatcattctttatgatgacccgaagcttgaaaaaagcgaattcaccatcagtcaatcggcaatcagcggtgatctcaaaatcccggcgtcactgaacggaacgaagctggccacggttaaaggagtcgtcgattctacaggaaggccggttcttgaagaagtatggtcatggacgccctacttgaactatgacgaagatttttacgaaaaagacggggatttgtatttgaaagagcgggttttaaagtatttgaaaagcgattccacctttacatttgaactgtggccgaaaggcgtggaggcggtcgtgaaggtgaaaatcacgccttgaacggccggctatcctctcaatgacgccgtccatgcatcctctttatgaaagcagggaaaaataatgatgacgaaaaagggtttattgacagtgctgatgccgtttttgcttgcactttccgccattcagtttggcaatccccggcctgcactagccgcgtctccttttgttgagacagccggaacatcgttcactttaaatgggaaagaattttattttgccgggacgaataactattattttcattataaatctaaaaaaatggtcgatgatgtgttcgaagatatgaaagcgatgaatttgaaagtgatccgcatctggggatttcttgacggccagccgcaggaaaatacagtcatgcagccaaggccgggcatatatgatgaatcaggcttttcaaagcttgactatgccatttataaagcggggcagacagggataaaactagtcatcccttttgtgaacaactgggatgatttcggcggaatgaatcaatatgtcaggtggtttcaggcggatggacatgacgccttttatactcatccggacattaaagaggcgtataaaaattatgtatcctatatgctgaaccgagtcaacacatataatggcgtcaaatataaagatgatcccgcgattatggcgtgggagcttgccaatgaaccgagggtccagtctgacaggaccggaaatacacttgtcgaatgggcggatgagatgagcgaatttattaaatccattgatcagaaccatcttgtagcggttggagatgaaggattttatcatatagaagggcaccctgattggcattacaacggcggagagggtgtggattggaaaaggctgaccgctctgaagcatattgattacggcacatatcacctctatccggatcattggggcaaaacggccgagtgggggaatcagtggatcacagaccatatttgcgatggaaaagaaatcggcaagccggtcgttttagaagagtacggctatcaggataagtccagaagggactacgtctacagaacctggcttgaactcatagaaaagcagagcggtgcgggcagccaattttggattttgaccggcattcaggatgacgggaccctttatccggactatgacggttttcggatcgtttatccgagctctgccgcttctgtcatttcagagcacgcggagcggatgaatgaaaaatcagccgcttccgaaatgcttcagactaaacgctgtcatgatttgcaataaaaatatggttatggtatagttttattggaaatgctaacgatagccgaggcgaagagtggggaaacccgctcttttgtattgaacaggcaattttgtctcgacatgttcatcgttttttctaaaatcccctgcttttgaagcagggtttttacgagggagctgatgaatgggagcctgcacaaggaggaaaagtatgagtaacaaagtgatcgataccgtcagcgaaatggtccagcctatactagacaatcttcagcttgagctcgttgacatcgaatttgtcaaggaaggccagagctggtttcttcgcgtgtttattgattcagatgacggcgtagacatcgaggaatgtgccaaggttagcgaagctcttagtgaaaagctcgatgaggctgatccgatcaagcaaaactattttcttgaagtatcgtccccgggagctgagaggcctttaaagaaagaagccgatttcatgaaggcgctcggaaaaaacgtatatattaaaacgtacgaacctattgaaggcaataaagagtttgaaggcgagctttccgcatttgacggtgaaaacgtggaggtcacggtgatgatcaaaacgcgccggaaaacgatcaatattccatatgacaaagtagccaaagcgaggctggctgtttcgttcaattaatttttgactgtttaagggggaaaccataaacatgagtagtgagttgttagatgccctgactgttcttgaaaaagaaaagggaatcagtaaggacattattattgaagcaattgaagctgcgctcatttccgcttataagcggaacttcaaccaggcgcagaacgtcagggtagatttaaaccgcgacaccggttcaatccgcgttttcgcccgcaaagatgtcgtggatgaagtgtatgatccgcgccttgaaatctcgattgaagatgccgtaaacatcaatccgaactacattgtcggagatgtcgtggaaatcgaagtgacgccgaaagatttcggccgcatcgctgcccagacggcaaagcaggtcgtgacccagcgcgtccgcgaagcggagcgcggcgtcatctattctgaattcatcgaccgcgaggaagatatcatgacaggcatcgtccagcggatcgacaataagttcatctatgtctctttaggaaaaatcgaggcgcttctcccggttgcagaacagatgccgaatgaagtctacaagcctcatgaccggatcaaggtgttcattacaaaagtcgaaaaaacgacgaagggtccgcagatttacgtttcaagaactcatccaggtttattaaagcgtctctttgaaatcgaagtgccggaaatttacgatggaacggtcgagctcaaatccgtggcgagagaagcgggagaccgctcgaagatttccgtccgcacggataatcccgacatcgatcccgtcggcgcctgcgtcggaccgaagggtcagcgcgttcaggcgatcgtcaatgaattgaaaggcgagaaaattgatattgttcactggtcaaacgacccggttgaatttgtcgccaatgcgctgagcccttcaaaagtgctcgacgtcatcgtcaatgaagaggataaagcgacaacggttgtcgttcctgactatcagctgtcgctcgccatcggaaaaagaggtcaaaacgcccgcctggcagccaagctgacaagctggaagatcgatattaaaagcgaaacagatgcaagagagcttggaatttatccaagggagcttgaagaagaggagccggaagagcttttcttggaaagcgaaactccagaatcggatgaataagaggtgacctttggtgaaaagccgaaagaagatcccgcttagaaaatgcgtcgtaacaggggaaatgaagcctaaaaaagagctcatccgcgtcgtccgttcgaaggaaggcgaagtttccgttgacccgaccggcaagaagaacggccggggagcctaccttacacttgataaagacgtcattttaactgcaaaaaagagaaacagcttagcaaatcagcttcaagcacagattgatgatcagatttttgatgaactgctggaactggcggaaaaggagaacagataaatgtcggaatcagaatggttttccttgctgggtctggcgaatcgagctcgaaaggtcgtgtccggagaagacctggttgtgaaagaaatcaggcattcgcgcgcaaagcttgttttgcttgcagacgacgcatcggctaacacggagaaaaaagtaaccgacaaatgcaggcactacgatgtaccggtgaaaaaagtcggtgatcgtgtgcttctgggccgttcaatcggcaaagaatcccgtgtggttgttgctgtcactgatcaaggttttgcgaatacgttgctccgaaagctcgattaattttttttgggggtgaacgaatggctaaaatgagagtttatgaatatgcaaaagccataaatgtttcaagtaaggatattatcgcggcattgaaagatatgaatatcgaagtcaataaccatatggcgatgatcgaagaaaatgcgatcaaacagctcgatcaaaaattcaagaagagcgctaaacctgcgggaaataaaaaggatgccggtacaggcggacaaaagccgcagcaagaagccgcaaaactgaatgccggaagtaagccaaacaaaaatcgagacggaaagaagaataacgtgcagaatactcaatttaacaataaaaacaagaagaaaaacaacaacaacaaaaagaacaaacgcggtaaaaatcatcaatctcctcaggagaagcagttcaagccgaaaaaagaactgcctgaaaaaatcgaatttaccaactcaatgtcggtcggcgcgcttgccgaagagctcggaaaagaaccgtcagaaatcattaaaaaattaatgcttctcggcatcatggcgacgatcaaccaagatcttgacaaagataccgttgagctgatcgcttcagaatacggcgtcgaagtcgaagaagtgatcgtccatgaagaaaccgaattcgaaaaatacgaagagccggataacgaagaagacctcgaaatccgtcctcctgtcgtaacgatcatgggtcacgtcgaccacggaaaaacaacgcttctcgacagcatcagaaaaacgaaggtcgttgaaggcgaagccggaggcatcactcagcatatcggcgcttatcagatcgaggaaaacggcaagaagattaccttcctcgacactccgggccacgccgcgtttacaacgatgcgcgcacgcggtgcggaagttacggacattacgattctcgtcgtagctgcagatgacggggtcatgccgcagacggttgaagcgatcaaccatgcgaaagcggctgaagtgccgatcatcgtcgctgtcaacaaaatcgacaaaccgacggcaaaccctgaccgcgtgatgcaggagctgactgaacacggtcttgttcctgaagcatggggaggcgagacgatttttgttcctctttccgcactttcaggagagggaatcgatgagctgatcgaaatgatcctgctcgtcagcgaagtcgaggagctcaaagcaaatccgaaccgcagggcaaaaggaacggtcatcgaagccgagcttgataaaggtaaaggttctgtcgcaacgttgctcgttcaaaacggaacgcttcacgtcggagatccgatcgtcgtcgggaacactttcggacgcgttcgtgcgatggtcaatgatgtcggcagacgcgtgaaatcggcgggaccgtcaactcctgttgagatcaccgggttgaacgaagttccgaacgcaggggatcagttccttgtgttcaaagacgaaaaaacagcccgttccgtcggcgaagcgcgcgctaccaaacagcttgaagaacagcgcagcgataaagcgaagctcagccttgatgacttgtttgaacagattaaacaaggcgatgtcaaagaaattaacctcgtcgtaaaagccgatgttcaaggctctgttgaagcgctggccgcagctttgcaaaaaattgaggtcgaaggcgtcagagtcaaaatcatccacacaggcgtaggtgcgattaccgaatcagacattattttagcttctgcatcaaatgcaatcgtgatcgggtttaatgtcagacctgacggaaatgctaagagtaccgccgaagccgaaaatgtggatatccgcctccaccgcatcatttataaagtcatcgatgagatcgaagcagccatgaaaggcatgcttgatcctgagtatgaagaaaaagtgatcggcatggttgaagtccgtcaaacattcaaagtctctaaaatcggaacgattgccggaggctatgtaacggaaggtacgatcacgcgcgacagcggaatccgcttgatccgcgacggcgtcgtcatctttgaaggggaagtcgatgtgctgaaacgctttaaagatgatgtcaaagaagtttcacaaggctatgaatgtggtatcaccattaagaaatacaacgacatacgcgaaggcgatatgatcgaagcgtatgtcatgcaagaaattgaaagaaagtgatcggtttcgttgaatgcgaatgcatcatttacgatgcatcatcactcaaggaaaagcgggcggtgctgaagcggatcatcacaagaatccgcgccaagttcaacgtttctgtttcagaaattgactatcaggacacttggcagcgcacaagctttggtatcgccgccgtttcttcctctcgcgtgcaaacggaaaaagagctgcagcgggtcctcgcctttattgactcttttccggaaattgaacggacgatcacgagaacagagtggttttaacgtagaggtggtatggtcatgacgatgagagctacccgtgtgggagagcagatgaaaaaagaacttggtgacattatcggcagaaagctgaaagatccgcgaatcggatttttaacagtcaccgacgtcagggtctcaggtgatttgcaaattgccaaagtgtatatttccgttttaggcgatgaaaagaaacgggaagaaacgctcaaaggcctggcaaaagcaaagggctttattcgttccgaacttggaaaccgaatcaggcttcgcaaaacacctgaaatccattttgagttcgatgaatcgatcgattacggaaaccgtatcgaaacattgattcacgagctgaacgcaaacaaagaagaatcataagctgaaaaaggataggcgggcgactgcctgtcctttttagctccaaatgagaaaggggcgaagaagcacgaatgtataacggagtccttctattacataaaccggtcggcatgacctcgcacgactgcgtcatgaagatccgcaaactgctgaaaacaaaaaaggtcggccataccggtacactggatcccgaggtgtcgggcgttctcccgatctgcgtcgggagggcaaccaaaatcgtcgagtatttgaccgaaaagtccaaaacatatgatgcagaggtcacgcttggctgttccacggagacagaggatcagacgggggaagtcacagaaaagaaacccgtcttagcgccgcctgatgaacagaccgtgcagagcgtcctgagatctcttgaaggaacgattgagcaggttccgccgatgtattcagctgtcaaggtaggcggcaaaaagctgtatgaatacgcgcgggctggaatcgaggttgaacggccgaagcggaccatcaccatccatcatatcgaactgacatccgagatccgccatgagggggataaagcccgcttccggtttgttgtgacatgttcaaaaggcacatatgtcaggaccttggcggtaaccatcggggagaagctcggatatcccgcgcatatgtccaatctggtcaggaccgcgtcaggccctttcacccttgacgaatgcttgacctttgaagacgtcgaaggcttgatcgctgacggaacattgtctgaaaagctcgtccccatcgaacgtgcgcttgatcatttgccgaaatggataattagtgatacattagctaagaaagtggaaaatggagcggtgcttgaaacgcccggcagcttttctcatttgacgagcgaagaccgcattgcggtctttacggaagcaggccggtgcacagccgtctattatccgcatccgaccaaaaccggtttgttgaagccggcaaaagtactcgtgcaaaaaagcgaacaatagaaaaggtgaccgttcttgaagacgatacatatttcccacccacacgacttgaagcgtgaggattttccgacatcagttatggcattaggttattttgacggtgttcacctgggacatcagcaagtgattcttacagcaaaaaacaccgcggcaagagaaggggtcaaaacgtccgtgatgacctttcatccccacccttctgccgtgctcaaaaaaggccgggagccgaaggatttaatcacgcctttgcaagacaaaatcagcatcattgaagatttaggggtcgattttttatacgttgtcacatttacccctgaattcgcttctctatcacctgaggaatttatcgatcaatatatactcggctttcatgtcactcatgttgtagccggatttgactttaccttcgggaaattcggcaaaggcactatggaaaacttccaggagtatgcgaaaggccgtgttaaaagcacgtctgtcgcaaaatattccaatcaggatcaaaaggtaagctccacgaggatccgcagcgttctgggagccggtgacgtcgagtacgctgctgaactgctcggcaggccgtaccatgtgaaaggctttgtgatccacggcgataaaagaggccgcacgatcggatttccgaccgcgaatatcggccttaaagacacatacatcgtcccgccgacaggtgtgtacgccgttaaagccgaaatcggcggcgctgtctacaacggcgtctgcaatgtcggatacaagccgacgttttacgaaaaacggccgggtcagccttcaatcgaagtcaacttattcgattttgaccgtgacatatacggctccgaaatcaaggttgaatggtataagcggctgaggagcgaaaaaaaattcggcagcgttgacgagcttgtcgaacagatttctagagacaaagaagaagcgatccgcttcttcagagagcggaagccggccggaatctagatgtatggaaacggcaatacgcgtcaacaatggtgataaaaaggtaaacttcatcataaatggttgcattagacccgaacttttagtatcatattgtctgtagctttaaaaccgttcacttggcaaatcgaatcaccggcgtttgctaggtaatcggggctaatattatatggaggtgaaacaggatggcaattactcaagagcgtaaaacacaactcatcaatgagttcaaaacccacgaatctgacacgggatcaccggaagttcagatcgctatcctaacagatcaaatcaacaacttgaacgagcatttacgcactcacaagaaagaccatcactcacgtcgcggtcttcttaaaatggtaggtaaacgtcgtaatcttcttacgtatcttcgtaacaaagacgtaactcgttaccgtgagttgatcaacaaacttggattacgtcgataatcgtaaaaagcgggaggattcccgcttttttatcgtataagaacgaatatccggcaactctaaaacgcgttgttcatataaatgattttaaatgacaccgattcattctttacatagcactttgccattgatatgttcaattcatttcgttcataataggagtaacctaaaaactatccgaagagaggagttcatataagaatgggacaagagaaacatgtcttttccatagattgggccggccgcaagctcacagtagaaaccggccagcttgcaaaacaagcaaacggagctgtcatggtgcgttatggagacactgcagtgctcagcaccgcaacggcttcaaaagaacctaaaaccgtagactttttcccgttaaccgtaaattacgaagaaagactttacgccgtcggaaagattccgggcgggtttattaaaagagagggaagaccgagcgaaaaagcgattctcgccagccggttaatcgacaggccgatccgcccgctgttcgcagacggcttccggaatgaagttcaagtcgtcagcatcgtcatgagcgttgaccaggattgttcgtcagaaatggcggcaatgtttggatcatctcttgcgctgtgcgtatccgacatcccgtttgaagggccgatcgccggagtgacggtaggccgggttgacaacaaattcatcatcaatccgacacttgaacagcttgaaaaaagcgacattcatctcgtcgtagcgggaacgaaggacgcgatcaacatggttgaagcgggagcagacgaagttccggaagagatcatgcttgaagcgatcatgttcggtcacgaggagatcaaacggctgattgccttccaggaggaaatcgtcgccgctgtcgggaaagaaaaatcagaaatcaccctgtatgagatcgattccgatctgaaagaaaaagtgcggggaatggccgaatcgaacctcttaaaagccattcaggttcatgaaaagcatgcgcgcgaggacgcgatcagcgaagtgaaaaacgaggttttggccaagtttgaagaagaggaacacgatgaagaaacgctgaaacaagtgaaagacattttgtcccagcttgttaaaaatgaagtgcgccgtctgattacggaggaaaaagttcgtcctgacggcagggctgtcgatgagatccgcccgctttcttcagaagtcggactgcttccgagaacacacggttcaggactttttacaaggggacagactcaggcgctcagcatttgtacgctcggtgcgcttggcgatgtgcagattttagacggtctcggcgtcgaagaatccaaacgctttatgcaccattacaacttcccgcagttcagcgtcggggaaacagggccgatgcgcgggccgggacgccgcgaaatcgggcacggagccctcggggaacgagcgcttgagccgattgttccgtctgaaaaagacttcccgtacaccatccgcctcgtctctgaagtgcttgaatcaaacggttccacttcccaggcgagcatttgtgcaagcacgctagcgatgatggatgcaggggtgccgattaaagccccggttgccggaatcgcgatgggtcttgtcaaatcaggtgacaactataccgtcttaaccgatattcaaggtatggaagaccatctcggggatatggactttaaagtggcgggaacgtccaaaggcgtcacagctctgcaaatggatattaagatcgaaggcttatcgagagagattttggaagaggctcttcagcaggcgaaaaaaggcagaatggagatccttgaaagcatgctgagcacattggctgaatcaagaaaagagctttctccttatgcgccgaaaatcttgacgatgtcgatcaatccggataaaatccgcgacgtcatcggaccaagcggaaaacaaatcaataagatcattgaagatacaggcgttaaaatcgatattgaacaagacggcacaatcttcatttcttctaccgatgaaagcatgaaccaaaaagcgaagaaaatcatcgaagaccttgtcagagaagttgaagtcggacagctttacttaggtaaagtgaagcggattgaaaaattcggagctttcgttgaactgttcagcggaaaagacggtcttgtccatatttcagagcttgcgctcgaacgggtaggaaaagtcgaagatgtcgtcaaaatcggcgacgagctccttgtaaaggttactgaaatcgataaacaaggacgcgtcaacttatcaagaaaagctgtactgcgtgaacagaaggaaaaagaagaacaaaaatcgtaaaaaaaacggtgtctatcttgcttctgtcttcgtcttcaagcaacaggaagcctgggtaacccggcttctttgttttaagccgtgaaaacggtccggttctatcttgtccttttctcacatattttgtggggaagggaggaatacaattgaaaggaacgattgttcggatttccgtttttttctttcttttgctgatgtcctatcagatgatgaaccgtccgtattcacaacattacatagatgcgatgaaaaaagacgcggtcacggttgccgctcaaaaggacgatttgtaccaggagcttttgcaaaaagcgcctgaatatgaagtgaaggcccagaatgcgaaaattgatcacatatggaaagcgatgcccggctacaacggcttaaaagtaaacatcgaaaaatcgtacaaaaaaatgaaacaggccggtgaatttgatgagaaactgctcgtttatgaccaagtgaagcctgacgttcatttagaatccttaaagcctgagccgatctaccgcggacacccggataaaccgatggtatcgtttattatcaatgtcgcttggggtaatgaatatttagaagagatgcttcccgtcttacaacagcatcgtatcaaagccaccttttttctggagggcagatgggtgaagcatcaccccgagctggccaaagccatacaaaacggcgggcatgaaatcggaaaccattcatacaatcatccggatatgagcaaactgacgagagaacgtatttcagaacagctgcggatgacaaatgaacaaatacaggaaacgcttggcgtcaagccgaagtggttcgccccgccgagcggcagcttccgcaaagaggttgtggatcaggctcacaagatggggatgggaacgatcatgtggacagttgatacgatcgattggcagaaaccgcagccggccgtcttacagcaacgggtattaagcaaagtacataacggcgccatgatattaatgcatccgacagatccaactgcaaaaagtcttgccgttttgatacagaacctgcatgaaaaaggctatcaaatcggaactgtttcacagctgatgaatgaaaaaaggcttgttgaagaataggatgtgcggcccgttctttgaataggaggaacaaatttgattaaacggtatacttgtcaaaatggggtaagaatcgtattcgaaaacaatcccaccgtccggtctgtggccatcggagtttggattggaaccggatcaagacatgaaacacccgaaattaacggcatttcgcactttcttgagcacatgtttttcaaggggacaaaaacgcgcactgcaagggacatcgcagagtctttcgatagaatcggcggacaggtcaacgcgtttacctcaaaggaatatacgtgctattacgccaaagtgctcgatgagcatgcaagctatgctctggaagtgctttctgacatgttctttcattcatcatttgacgaagaagaattaaaaaaagaaaaaaacgtcgtctatgaagagattaaaatgtatgaggacacacctgatgacatcgtccacgatctcttgagcaaggcgtcatacggcagccattccctcggctatccgatcctcggcacagaggaaacacttgccgaatttgacggagattcgctcagaaaatatatgaacgaatattacacgcctgaccgagtcgtcatttccatagccggaaatgtgccggaaacttttataaaagaagctgaaaagcatttcggttcatatgaagccaaaggcaaaagaaccggcatgacaaaaccggattttcaccatgagaaaatgacgcgcaaaaaggaaaccgaacaggctcacctctgcctcggcttcaacgggctggaagcaggccatccggaaatctacgatttgatcgttctcaataatattttgggaggaagcatgagcagccgcctctttcaggatgtccgcgaagataaaggtcttgcatattccgtgttcagctaccacacttcctatgaagacagcggcatgatgaccatctacgcgggaaccggcgcaaatcagcttcagctcctgtcagaaacgattcatgaaacactgcgtgcgctgaaaagcgacggtattacaccgaaagagcttgaaaacagcaaagagcaaatgaaaggcagcctgatgctcagtctcgaaagcacaaacagcaaaatgagccgcaacggcaaaaatgagcttttgctcggtaaacaccggacgcttgatgaaatcatcgaaaagttgaatgccgtcagcctcgagcgtgtgaacaatcttgccaaccggattttcaccgatgattactcatctgcattaatcagcccgtcgggtgagctgccgaaataatgcctccttaaaacatgcttgtctttttaggcaggcatgttttttgttatcggttcatacatcataacaaaagggggtttttttcatgaggctgagtgaactttcgggaaaagaaatcgttgatgttaagcgggccgaacggctcggcgtactggggcagacggaccttgagatcaatgagcaggacggtcagattaccgctcttatcatcccttctgttaaatggttcggactaggaagaaaacaggggaatgacattaaggtgccctggtcgcaaattcaaaaaatcggctcggatatgatcattttggatgttccggaaagcagcgtgacaaaagaggagtaagcaaggtggaaacccgcccgtcccatgggggcgggctttttgtttttctggatttcaattcaccgctatttcctttttgtcatatgatgaaattagcttatgaattagatccttgtcaaaaaagaaggtgaatgttagagccatgttaaccggattgacgattgcaatcatcggcggcgatgcaaggcagctcgagatcatccgcaagctgacggaacaggatgcaaaggtctttttaatcggttttgatcagcttgatcacgggtttaccggagctacaaaactaaagctgaacgaacttgattttggcacaatagacagcattattctgcctgtatcgggcacatcgatggaaggaacggttgcgactgttttttccaatgaaaaagtggtgttaaaacaggaacatttagaaaaaaccaagccgcactgcgcgatttattcagggatttcaaaccaatatttagacggcatggccaaaggggcgaaccgtcgtcttatcaagctctttgaaagagacgatattgcgatttacaactcgatacctacagtcgaaggtgccattatgatggccatacagcatacagactttacgattcacggctcgaatgtaatggttctcgggctggggcggacgggaatgagcatcagccggacgttctcggcgctcggcgcacgcgtaaaagtcggagctcgcgactccgcccacctcgccagaatcatggagatgggcctcactcctttccacacaaacgaacttgcagagcatgttgaaaatatcgacatatgcatcaataccattccaagcctgattctcgataaacatgtcctctcacgaatgacacccagaacattaattctcgatttagcaacccgtcccggaggcacagattttgattttgccgaaaagcaaggcattaaagcgctgcttgctccaggacttcccgggatcgtcgcgcctaaaacggcgggacagatcattgccaatgttttgtgcaaccttttgtctgaattaacaactgaccgaaaggggctgtcataatgtcgatcaaaggaaaaagaatcggatttggcctaacgggttcacattgtacgtatgatgccgtttttccgcagattgaagcgctgatcaacaaaggggctgaagtcagaccggtcgtgacgcatactgtcaagtcgacggatacacgctttggagaaggggaagaatgggtcagaagaatagaagagctgactggatttgaagtcattgattccattccgaaagctgagcctctcgggccgaaaacaccgctggactgcatggttgttgcgccattgacgggaaattcgatgagcaagcttgcaaacgcccagacggacagtccggttctcatggcggccaaagcgacgatgagaaactcccgtcccgtcgtcctcggcatttcaacgaatgacgcgctcggcttgaacggcgtcaacttgatgaggctgatggcggcaaaaaatgtttactttattccgttcggccaggatgacccttacaaaaagccgaattcgctcgtcgccaaaatggatcttttagtgccggcggtcgaagaagcgctctcccataaacaaatacagcctatcctggtccataatgatcaataaatcttttgaaaataaagatgtaacaaaaaatatcaatcaccacggcacacatctatgttaaaataaaatgtaaaatgcatagtcaaccaatcgtttacgacgattaaggtggaaggagttttacaattgggcagaggattacatgtagcagtagttggtgcgacaggcgctgtaggacagcaaatgttaaaaacactagaagacaggaattttgaactggataaactgactttattatcctcaaaacgttcagcaggtacgaaactgactttcaaaggcgaagagtacacagtagaagaagctcgtcctgagagctttgaaggcgtcaacatcgcgcttttcagcgccgggggaagcgtttcgcaggcgcttgctcacgaggctgtcaaacgcggggcgatcgtcattgataatacgagcgcgttccggatggaccaaaacactccgctcgtcgtacctgaggtcaatgaggaagatttgcacaagcacaacgggattattgcaaatccgaactgttcaaccatccagatggttgttgcgctcgaaccgatccgcaaggctttcggtttaaacaaaatcatcgtatcgacttatcaggcggtgtctggagccggaaacgaagctgtaaaagagctctacgggcaaaccgaagccattttgaacgacaaaccgttcgagcctgagatcatgccggtgaagagtgatgaaaaacactaccaaatcgcatttaacgctattcctcaaatcgataaattccaggaaaacggctttacgtttgaggaaatgaaaatgataaatgaaacgaaaaaaatcatgcacatgcctgagcttcaagtttcagccacatgtgtcagactgccgattgcaacagggcattcagaatccgtctacatcgaaacagaccgtgatgatgtgacagcagaggatattaaaaatctgttaaaagaagctccaggcgtcgttctgcaggatgatccagctaaacaggtctatccgatgcctgcagatgcagtagggaaaagagacgtatttgtcggccgggtgagaaaagaccttgaccgcccgaacggtttccatctgtggatcgtttccgacaacctgctgaaaggcgcggcatggaattccgtacaaatcgcagaaagcctaaaagctttaaatttagtttaagatttctaacgggatgtgagaagagagtgaggcaaaaatgaaggcctgctctcttctgttacgtccgaaatcaacttggagtgaaataaagtgaaaatcatcgttcaaaaattcggcggaacgtctgtaaaagatgaccgcggcagaaagcttgccttaaaccatattaaggaagcggtcaatgaaggatacaaagcggttgtcgtcgtatcggccatgggccggaaaggcgatccgtatgcgactgattcattgcttgatctgctttacggcggacaggatacaattaccgagcgtgagcaggatatgcttttatcatgcggggaaacgatttcctctgttgtgttcgccagcatgcttttggaaaacgggattaaagctgctgctttaaccggtgcgcaagcgggctttttaacagacaacaaccatacgaatgcaaagattctcgaaatgaagccggagcggcttgtcagcatgctggccgaccatgatgcggtcgtcgtcgcaggcttccaaggcgcgactgcaaaaggggatatcacaacgatcggccgcggcggaagcgatacatcggccgctgcgcttggcgcggctctggacgcggaatttatcgatatttatacagatgtcgaaggcgtcatgacagctgatccgcgcatcgttgaaaaagcgaagccgctgcctgtgattacctatacggaaatctgtaatttagcctatcagggggccaaggtgatccacccgagagccgttgaaatcgcaatgcaggcgaaagtgccgatccgcgtgcgttcaacctattcaaacgaaaccggtacgctcgtcacaagccatcacaactcgaaagccggaagcgacgtttttgagcagctcatcacaggcatcgcccatgtgaaagacgtgacacagtttaaagtcccggcaaaagaaggacaatataacgtacagactgaagtgtttaaagcgatggcgaatgcgggcatcagcgtcgatttcttcaatattacaccaagtgaaattgtctacacggtggctggaaacatgacagaccgcgcccacagcatcctgaaggaattgggctatgaaccggccgtgacgagaaattgcgcgaaagtgtcagcggttggcgcggggattatgggcgttccaggcgtcacctcaaaaatcgttaccgctttgtcagaaaaaggcattccgatcctgcagtctgctgacagccatacgacgatatgggtgctcgtgcacgagaaaaatatggcgacggccgtaaatgcgctgcatgaagtgtttgaactgtcaaaataaatatgattgaatcatgatgaggtgaaaaaaatgaatttcggaaatatcgcaaccgcgatggttacgccctttgacaaaaatgaaaatatcgattttcaaaaactgtcaaagctgatcgattatttactaaacaatgggacggattccctggtcgttgccggaacaaccggagaatcgccgacgctttccgaagaagaaaaggtagcgctcattcaatactctgtcaaggaagcggcaggccgtgccccaatcatcgccggcacgggaagcaacaacacgaaggcgtcgatcaagctgacgaaaaaagctgaagaagccggcgctgacgctgtcatgctcgtcactccgtactacaacaagccttctcaggaaggcatgtaccgccatttcagagcgattgcggaggaaacatcgctgcctgtcatgctttataatgtgccgggaagaacggctgcttcgctcgcaccagagacgacaatccgccttgcggagatcccgaatattatcgccattaaagaagcgagcggcgacctagatgcgataacaaaaatcgtagccgaaacccctgaggactttgcagtttattcaggagatgacagcctgacactgccggcgctgtccgtgggagcgagaggaatcgtttccgttgcatcacacatcatcggaccggaaatgcaggaaatgatcaaacattataccgaggggaacacggctcaggctgctttgatccatcaaaagctgcttccgctgatgaaagggctttttgccgcaccgaacccgtctccattaaagacggctcttcagctgaagggtcttgacgtcgggtccgtccggctccctttgattccgctaaatgaagatgaacgactccgtttaagcagcctgatgaacggcctgtaaaaaacaatacggacgaaaacggtcattctcttttggaggggatgaccgtttgtcatatacataatggttcttgttttctaaatttagattcaggtataatagggacaagtgatgatggacgggtacttagattaggaggattacaatttgaaaaaaaatacagaaaatattagaatcatcgccttaggaggcgtcggagagatcggaaaaaacctctatgtcattgaaatcgattcagacatattcgtggttgacgccggcctcatgcatccagaaaatgaaatgctgggtatcgatgtggtcatccctgacatttcttatttaattgaacgatctgaccgcgtaaaggcgatttttctcacacacgggcatgaagaaaacatcggcggcgtattttactgcctgaacaagctttctgtgcctgtttacggaacgaagctgacgcttgcccttttaaaggaaacgctgaagcagtacggtgtaaacaaaaagcccgatttaagagaaattcattcaaaatccgttattacatttgaatcgacaaaggtgtcattcttcaaaacaaatcacagcatcccggattccgtcggtgtcagctttaaaacatccctcggatccatcgtgtgcacaggcgattttaaatttgaccagacacctgtgttaaaccagacaagcgacatcggcgaaattgccaaaatcggcaacagcggtgtgctgtgcctgctttccgacagcgccaatgccgagaagccgggctatacgccttcagaagcactcgttggcggagagatatccgatgtgatgtacaacgccgaaaaccgcgtgattattgccgtgttcgcgtctaactttaaccggattcagcaggtgattgatgccgcgctgcaaaacggcaggaagcttgcagtttcagggaaaaatatttcggcgatactccagctggcgatgaaactcgggtatgtcacggcagatgaagatatgttcatccctgtccaagaagtcaaaaagtatccaaaaagagaagtcgcgattttgacaggggacaaccatggagagccgctcgccgcattgaccaggatcgcaaaacaagggcataagcagcttgacattgaggaaggggataccgtcctgatcgcatcctcccctatcccgggtcaggagcttgtttactccaaagcggtcgatctcttaacgagagcgggcgcccaggtcgtattcgcacaaaaacgcgtccatgtatcaggccatggctgtcaagaagagctgaagctgatgctcaacttgctgaagccgaagtatttaatccccgtaaacggtgaatacagaatgcaaaaagcgcattccaagcttgccgaagaaatcggcatgaaacggagcgacattttcctgattgaaaaaggagatgtcgtggaattccgcggacaaaacgttaaaatcggcgataaagtacactcaggcaatatattgatcgacggactcggcgtcggcgatatcggcaacatcgtgctcagagaccgccgtctgctatcccaggacggaatcttaattgttgtgattacccttgataaaaagaaaaaacatctagtttcaggacccgaaattatcacgagaggttttgtctatgtcagagaatctgaacagctgatcgttgaagcgacagagcttgtcagggaactcgtcaacgaaagcacagaaaacgccgtcgtcgaatggtccgccttaaaacagacgatgcgtgaggcattaaaccagttcctatacgaaaaaacgaaacgaaaaccaatgatcattccaatcatcatggaagtataaaaaaccaagagactcctcttggttttttttcatgccttttgcgttgaatgaaaaaaacgccattgtccataatacaaaagaaactcgagaaagaggtgagccagatggattcaaaccggatacaaaacggggacagccaaggggagcagccggctaagcaggacgcaaaagacagtctcgtcaacaaaatccagcagctcggcgaaacgacactcccgcagatggggcaggacaccaacattcactgcctgaccattatcggacaaattgaaggtcacgtccagcttcctccccaaaacaaaacaacaaagtatgaacatgtgattccccagatcgttgcagtagagcagaatcctaaaatcgaaggtctgctcatcatcttaaacacggtcggaggagacgtagaagcgggccttgcgattgcggaaatgctggcgtccctgtcaaagccgacggtctctatcgtactgggcggcggacattcaatcggagttccaatcgcagtgtcctgcgaccacagctatatcgctgaaacagctacgatgacgatccatccggtcaggctgacagggcttgtcatcggtgtgccgcagacatttgagtatctcgacaaaatgcaggaaagggtcatcaatttcgtgacaagccattccaacatatcggaagaaaaatttaaagaactgatgttttcaaaaggcaatttaacccgtgacatcgggacgaatgtcgtaggaaacgatgcggttaaatacggattaatcgatgaaaccggcggagtcggacaggcgattcaaaagctgaatgaattaatcgaacaaaacaagggcgcccaggaagggatgatccaatgattctgtatacgacaatgccgcaggaaatcgtgttcgcagggcaggcggaaaactcgaacttaaaacagatcgatgtaaacggcgtgccccttttagtcgagatgaacggagaggaagcaagggtcgttcaggttctcagcacgaacccgatggattttttaaaacaagaaacggcccctgggcagacgcttaaactgacattttataaatagctggagtgtctcaaggataaatatgctataataggggaatccagaggaaaatcgcagccgaaaaaaggctgctttctctttgtttttacattttttaacacgcagtaaggtgatggaacatggcaaaaagaaaacgaaaatcaacaaagaaacaaaaacaaggaaaaaaacggatccatcttaaatttgaattgtacggattaatctgtatcgccatctcgattattgcggttttgcagcttggcgtagcagggcaaacgttcatttacatgttccgctttttcgccggtgaatggttcatcctttgccttctcggcctctttttaacgggcttgtctttattttggaaaaagaaaacacccagttttttgacgaggagaaaagcgggcctttactgcatcattgcaagcatgctgcttctttcacatgtccagctgtttcagcatttgaccgaaaggggaatggttcagtctccgagcgtgatccaaaatacgtgggagctgtttctgatggatgtaaaaggcgagacaggatcgcctgatcttggaggcggaatgattggagcccttttattcgcggcgtcatattttctgtttgcatctgcaggatctaaaatcatcgccgtcttcctgatcttgatcggccttcttttgattacggatcggtcgcttcaggagacgctgatcaaatggatgaccccggtcgcctccttcatgaaaaaccagtggcaggcctttttagcagatcttaaacaattgaaaaacagctcgccgaaaaagaaatccggaaaaaaacaaaagacgcagagaaaaccgaaagtgtctgaagagcctgtacaagaagcggaccttgatccagatccggttattcaatcagaaccgattatttcaagcttttccgaccgtgatgaaaagcccgaagttcaagcttacgaagctccggcggctcctgctgaacctcctgctgagcccgaaatcggtgaggaaatgcaggcctccggcgcgcccgaaatcacgtttacagagctagaaaacaaggattaccagcttccgtcgattcaattgctggatgatccgaagcacacagggcagcaggcggataaaaagaatatttacgacaatgccaggaagctggaaaggacgtttcaaagcttcggagttaaggcgaaagtcacccaggttcatctcggcccggccgtcacgaaatatgaagtctatcctgatgtgggcgtcaaagtcagcaaaattgtcaacttaagtgacgacttggctttagcgctcgcggccaaggatatccgcatcgaagccccgatccccggaaaatcggcgattggaatcgaagtgccgaatgcggaagtggcgatggtttccttgaaagaagtgcttgaatcgaaactgaatgaccggccggatgcaaagctgatgatcggcctcggccggaacatttccggagaagcggtattggcagagctgaacaaaatgccccaccttcttgttgcaggagcgaccggaagcgggaaaagcgtctgtgtcaacgggatcattacaagcattttgatgagggcaaagccccacgaagtgaagatgatgatgattgatccgaaaatggtcgagctcaatgtctacaacgggattccgcatttgctcgctcccgtcgtgacagacccgaaaaaagcatcgcaggctttgaagaaagtcgtcaacgaaatggagcggcgctacgaattgttttctcacacgggaacgagaaatatcgaagggtataacgactatattaaacggatgaatgccgcagaagaagcaaagcagccggagcttccatacatcattgtgattgtggacgagcttgccgacctgatgatggtcgcttcctctgatgttgaagactcgatcacaaggctttcgcaaatggccagggcggcgggcatccacctgatcattgcgacgcagaggccttcggtcgatgttatcacaggggtcattaaagccaacattccgtcaaggatcgctttcagcgtatcgtctcagaccgactccaggacgattcttgatatgggaggcgctgaaaaacttctcggcagaggggacatgctgtttctccctgtcggcgccaataaaccgctccgcgttcaaggtgcctttctgtcagacgaagaagttgaaaaagttgtcgatcacgtcatcagccagcaaaaagcccaataccaagaagaaatgattccagaagagacgcaggaaacggtcagcgaagtgacagacgacctttatgacgaagcggtcgcacttgtggtcagcatgcagacggcttctgtatccatgctgcaaaggagattccgcatcggctatacaagagcggcgcggcttatcgatgccatggaagagcggggaatcgtcggcccatatgaaggatcaaaaccccgtgaagttctcttgtcaaaagagcaatacgaagaactctcttcttgagaagagagttcttgtttaacataatttcattatgtaaactaaaaaacatctatttatttatttgacaaaacatgatatagttatcctcaattaaagataatttgaatctgatctgtcagacggagggaaaacatgtcgataaaagctgacaatcaacggttatgtttaaaggtgattgatcggataaaagatgatattcaaaatggggtcttttgcgaaaatgaacggctcccgagtgaatttgagctgtcaaagatgcttggtgtgagcagaacggctttgcgtgaggcgcttagaatactggaagaagaaaacgtcatcatcagaaggcatggagtcggacattttgtaaatgccagaccgttatttctatcaggtattgagcagctgaacagcgtcacaaaaatgatcgagcaggcaagcatgacgccgggaaccatttttatgtcctcacaggttaccgctcccactgaagaagatatgctccggtttcaatatgcggaagaaaccgagatctttttgcttgagcgggtgagaacggcaaatggaatgccggttgtctactgtcttgataaaatacctgtggacattctcccggaaggcttttcacacgagcaggaatcgatgtttgaatggcttgagaacaaatccggcgccgtgatcagctacgctgttgccgatattgtgccaatcggatatcatgacaccatttcccaaattcttgaatgcgatcctgaaacgtctttgctgctgctcaaacagactcattatgaccaaaacgataagcccgttttatattctttaaactattttagggccgataaattcagatttcatgtcgtcagaaaacgtttttgatatgcgggcgctctattaggagcgtgttttttttgcccgcttgagcgcctatacataaataagcccgcatcatggaacaataacagatggaaatactgatgaattgggtgaaaaaagttgagcagaaaaaaagacatgaaaagcatttttgcgctgtcttcggtcccgctcgtgatgacgctcggcaattcgatgctgattccggttttgccggtgatcgaaaaaaaattaaacatttcttcgtttcaggtgtcgttgatcatcacggtttattcaattgtggcgattgtatgcatcccgattaccggctatatgtcggaccggttcggaagaaaaaagatcatgctcccatgccttctgattgcgggagctggaggagcgttagcaggtttggcttcaacttttttcaatgatccgtttgcgatgattttagcaggtcgcgtccttcaaggaatcggctcagccggcgcagcgccgatcgtcatgccgtttatcggcgacttgttccaaaatgatgaagaaatcagcgcgggactcggagatatagagacggcaaatactgccggcaaagtattaagcccgatattaggggcttttttagcatcttgggtttggtacatgccgttttggtttatcccggtcgtgtctcttgccagcttttttctcgtcttgttttttgttcccaaaccgaaggacaaagatgatgaaaagcaaacgttaaaaaactttgcaaaaagcgtacaggaaattttcaaacgggaaggtcggtggcttgtttccacttttgtcatcggcggaattattatgtttcttttattcggagtgctcttctacctgtcggatactttggagaagaagcatcaaattgacgggattgcgaaaggagcgcttctcagcattccgctgctttttctttccgtcagttcctaccttgccggaaagctgatcggaaacgataagatcagaatgaggatctgcgtgctgatcggcatgatcctgctggctttgtcgtttgccggtttgtggtggaaccacagcttttacccgttatttttgtttatgtccatcggcggcatcggcatcggaattgcgctcccttctttggatgcgctgattaccgagggaattgaaaaagaagagcgcggcacgatatcttcgttttacaacagcatgaggtttatcggtgttgcgctcggaccgccggttttcgcctatatgatgacaaatgcggggtggctgattttcatcgtatcgcttttgtgcagtttagctgcactagcgcttgtgctgtttaatattgacccgaaagaagacgaaagtgaagcggcaaagacggtgtagatctgcaccgtctttttcataaggttttttagtttccttaaatctcctccagttgatataattacaaccatacagtccaagcgcatatgctgaaatgtggtcataatacataatataaacaaggacgatggaggttctagtatgacataccttaacgaaataaaaggaaagcaccgcggattgacaagccacattgtcaaaacggaaaaattcaaaaccgtctcgattatttttaaaatgcttgctcctttaacaaaagaggatgtgacaaagagggcgctttttccgcatgtgcttttgcggggaacgagcacccgccccaaaacggccgaactcagatcgtatcttgatgaactttacggcacttccgtatcatgcgatctctccaaaaaaggggaaatgcatgtcatcacattcaggctcgatatcgctaacgaaaaatttttaaaggatcagacaccgcttctggaaaaagggcttgagcttttgtcagagatcattttttcgccggcgcttgaagacggggcctttctgccgctgtacgtgtctcaggaaaaacgcacactaaagcaaagaatacaggcggtctataacgacaaaatgcgctattcaaatttgaggctgattcaggagatgtgcaaagatgagccatacgcgcttcacgtcaacggagagcttgatgatgtggacggcatcacgcctcaaagcctgtatgaagcttatcaaaaagcggtcagcgaagaccagctcgacatttacgtcgttggggatgtggatgagcagcaggtggattcgtacatttccaaatactttgaagcaaacgagcgggagctgagacctgttcccgagcttgagcaaacccgcacaagggagcctcaggaagtcatcgaggatgctgatgtcaagcaagggaagctgaacatgggatttcggacgggaacgcattttacggatgacgattatacggcgcttcagctgtttaacggcttgtttggcggattttcacattccaagctgtttattaatgtcagggaaaaggccagccttgcctattatgcggcttccagaatcgaaagctttaaagggctgttgatggtgatgtcggggattgaagtcggcaattatcaaaaagccgtcgacatcatcaaggagcagtttcaggaaatgaaaaaaggcagctttacagaagaggcaatcgaccagacgaaagccgtcattaaaaaccagattcttgaaacgcttgatacaccgtacggtttagtcgaatttatttatcagcaggctgccgcccaaaccgaattttccttggaagactggctgggacgaatcgacaatgtcacaaaagaagacatcatcgaagtcggaaagaaaatcgatttggatacaacgtactttctcaaagggacggagggagcatcttgacgaaaacgatcgaatttgaacagctgaaggaaacactatattacgaaaaaatgcctggcggcctcgatgtctatgttcttccgaaagaaggatttaacaagacatatgcggtctttaccacaaaatacgggtcgattgacaatcagtttgtcccgctcggaaaagatgaaatggtccgcgtgcctgatggaatcgcacactttctcgaacataagctctttgaaaaagaagacggcgacgtttttcagcaattcagcaggcagggagcttcggcaaatgcgtttacctccttcacaagaacggcctacctgttttcaagcacgtcaaatgtggaagaaaacctggaaacgctcgtcgactttgtgcaggacccttactttacagaaaaaacggttgagaaggaaaaaggcatcatcggacaggaaatcaacatgtatgacgacaaccccgactggcgcctgtttttcggcctgatcgaaaacatgtatcaagagcaccctgtccggatcgatatcgcaggcacgatcgaaagcatctctcatattacaaaagaccttttgtacgaatgctatgagacgttctatcatccgagcaatatgctgctgtttgtcgtcggtccggtcgatcccgaagcgatcattcgccaggtccgcgaaaaccagcagaaaaaaccgtatacagaccagcctgaaatcgtccggaaagaagttaaagagcctggggccgtatttaaaaaagaacaggaaattaaaatgaatgttcaaagctcaaaatgcctcgtcggtttaaaaagcgctcatccgatgaatacgggagaagccctgctgaagcatgagctgaccatcaacctcatcctcgagtgtctgtttggcaaaagctcaagcgattacgaaagaatttatgaaaaagggtatatcgatgagacattcagctatgactatactgaagaacacggatttggcttcgtctctgtcggcggagatacgcctgagcctgacaagctggccgaagagctcaaacaagtgctgttcaaagcgaaagaaacgatcacagccgaaaagctggaactggccagaaagaaaaaaatcggcaatttcctgaaatcgatgaattcgcctgagtacatcgccaaccagtttacacggtacgcttttctggagacgagtctgtttgatatcgtcaccgtactcgaatcgattacgcttgatgacgttcaccgcgtcattgaggaagaagttgaggaagacaggatcaccgtctgcaaagtcgttccaaaatcataaagcaaggtctgaaagttcagcgtgcagggatatttccgatgcacgctgaacctttcttcttttttaacggaaaggtggaaatatggtatgacaaaactcgctctcatcaccggcgcaagcggcggaatcgggcaaagcatcagcgaaaagcttgcgcaaaacgggtatgatcttctcctccattatcatacaaatgagaaggcggccgcttcacttgcagaaaggctgtcacatacatacggcattcacgctgaaatcattcacggcgacctgtccgaccccggaggtgcaaaagccgtttccgcttccatcggcggacgggcgctagacggcatcgtcttgaacagcggacaaagcttccgcgggcttgtgacagatatgaccgatgaagctgtacaggacatggtgcagctccatgtctcaagcccgtttctattaacgaggaatctgcttccggcgatgatcaggaaaaagtccggcgctattgtagccgtcagctctatttggggtgagacaggggcgtcgtgcgaagttttatacagcatgacaaaaggcgcgcaaaatgtgtttgtcaaagcccttgcaaaagagcttgcgccgagcggcatcagagtcaacgctgtttctccgggcgctgtaaaaacaaagatgatgagctcattttcaaaagaggaagaagagatgatcgccgatgagattccgatgggaaggctcgccgaagccgaagaggttgcagacgccgtcttgtttctgctctcggcgaaagcatcttatatcacgggtcaaattttgtcagttaatggcggctggcattgttaaaaacatgtatagtttacgattcccaagagaataataaggctgtaacttcaagagaatggaggggcctgatatgtccgtactggataattgggatcagtggaaaaactttttgggcgaccgtttgaactatgcccaagaacaaggaatgtcaaaagaaaccatctcagatcttgcatatgagatcggcgattatttggccggtgaggttgattcaaaaaaccatcaagaacgagtgctcgcagacctttggagcgtggcttccgaagaagagcagcgcgccattgcgaacgtgatggttaagcttgttgaaaacaacagctcacattaaggagagagtgtgttcactctctcttttttataggcgcgattttgcctgcggcaccgcttttatcgtttgcttttcgccccgacagggtaaacagcattcaggcgccgatacagcaggtttttcccgattttgggaaacggacgtttttcttatttaatcacaacattctgctttctaattaagacaaaatgctttatgataaaggaaggtaaatttttgccacgatgatgggtagggaggttatcatttggcaaagctcgaatggtacttagaatatgaaatccaagtcaaccgtcccggacttctgggagatatatcctctttattggggatgctttcaattaatattgtgaccattaacggcgtcgatacacaaagaagaggcctcttgttaaaatgccgtcatatagatcagattaagcgattggaatcgattttgaacacgatggatacgattaaagtcacgaagctccgcgaaccgaagcttcgcgaccgtctcgctgtaaggcacggccgctatatccagcgggatgcagacgataaaaaaacgttccggtttgaacgcgacgagctcggcttgcttgtcgattttatggctgagctgtttaaaaaagacgggcacaagctgatcgggatcaggggaatgccccgcgtcggcaagacggaatcaattgttgcttcaagcgtctgtgcaagcaaaaggtggctttttgtttcttcgacgctgctgaagcaaacgatcagaagccagctgattgccgatgagtacagtccggaaaatgttttcattttggacggcattgtgtcgacgagaagaggatctgaacgccatttgcagctcgtcagtgagattatgcgtctgccggcgaccaaagttgtcgagcatccggacattttcgtgcaaaatacggaatatacgatggacgattttgactacatcatcgaattgcgtaacagccccgatgaggtgattacatatgagcacgctgaagaaccgcagatgtttgaccattcaggtttttccggctttgatttttaaaatggaaggtgtttgttgtgactgaactaggaaatcggctgaaagaagccagagaggaaaaagggatgtcattggacgaccttcaggcggccacaaagatccaaaaaaggtatttaacggcccttgaagaaggaaactatgatatcattccggggaaattttatgtgagggcttttatcaagcagtacgccgaagctgtcggcctcgactcggagcacttgtttgaagagtttaaaaaagatatccctaattcttacaatgatgaggtttctgagaagctttcttcaatcaagccgcagagggagcttcccaagtctgcctcaaaagcgcttgaacttttgcccaccttgcttgtggcagccggcgttatcgttgtgatcgcgatcatttacgtcattgttcaggctgtaaacggcggagggaatcagcaggctgaagggcctaaaacagaggaatcgcaaagcaagtacgacgtctcaaaagattccccgctgactaaggaaaatcaacagaacacggatgcgcagaaagacagcgctgaaggcgacaaagaaaaaaaggatcagcagtctgatgagaacgacaagctgaccattaaagcgaccgcaagcgaaggctcttccacaacctatgaagtatcaggatccgacaagctggagcttgaagtaaaggcaagcgaaaactcatgggtcagagtgcgcgacgagaaaggaagctctcttaaagaaggaatgatgaaaaaaggggaaacctttcaaaagaatataaccgatcaatcgcaaattgatttgcggatcggatatgcgccgggcgttgaaattaaaatcaacggagaagttctttcttacaagctcgatcctaagactgtgatgacacaaaacataacgattcaaaataaaaaggaggaaaagtcatcttaattgcacagatgactttttcttgcgttcatcatcattaggaaaacatacatatatggaggaacctttatgtttaatttaccgaataaaatcacgctttctagaatcgcattaattcctgtttttatggtcatcatgcttgtgccgtttcagtggggggctgtctccttcggcagcgagtcgattccggtcacccatttgatcggcgcactgctgtttattttcgcttcggtcaccgattgggttgacggctattatgcaagaaagctgaaccttgtaacaaactttgggaaattccttgacccgcttgcagacaagctgctcgtgtcttccgctttgattattctggtgcattaccatcttgctccggcctggatggccattgtcattatcagccgggaatttgccgtaacgggactgcggctcgtccttgcgggaacgggggaagtcgtcgcagccaacatgcttggaaaagtgaaaacatgggcccagatcatcgcgatctctgcccttttgcttcacaatctcccatttgagcttgtatccttcccgttcggctctcttgctttatgggtggctgtctttttcacagtcgtatccggctgggattatttcgctaaaaactgggatgctttaaaaacatcgaactaaacgtagggaagtggaaacaatgaagttggaaagaaaagcggaaattatcgctgtcggctctgagcttctgctcggacaaatcgttaatacaaatgctcagtttatcagcaggcatttggccgaaatcggcattaacgtcttttatcacacggcggtgggagacaatccggagcgccttaaacaagtcattcagacagcgcagcaaaggtctgacttcatcattttttcgggaggcctcggaccgacgaaagacgatctgacaaaagaaacgatcgccgaagttgtcgggcgccctcttaagctcgacgatgaagccttcgaatcgattcaggattacttcaaaaaaacgaaccgggagatgtcgccgaacaaccgcaaacaggcgctgatcctcgaaggatccgatgttctgccgaaccgcttcgggatggctccgggaatgctgcttgagcatgaatcgcgcttttatatgcttctgccgggacctccgaaagagctggagccgatgtttgaaaacgaagcgaagccgctgattttggaaaagctcggctcgagggaaaagatcgtgtcaagggtgctgcgcttcttcggcatcggtgaatcccagcttgaaaccgatttggaagatctcatcgatgcgcagactaatccgacaatcgctccgcttgcggcagacggggaagtcacgctcaggcttacggcaaagcatgcggatccggaggagacaaaccgcttgttaaaagaaacggaagaccgcattttggagcgggtcggagaattcttttacgggtatgatgatacatccctcgcagaagagcttgcgaaagcatgccagagcaagggtatgactctggctgctgcggaaagctttacaggcgggcttttttccagctggctgacggaaatgagcggcgcttccgaatatttcaaaggcggcgccgtctgctacacaaacgaattgaaagtgtcagcggccggcgtttcggaagacacgctgcagcgctatggtgcggtcagcgcgcaatgcgctaaagagctcgccgcaggcatcagagtcaagacaggaagcgatatcggcatcagcttcactggagtagccgggccgaatacgcaagaaggccatccggctggaaaggtgtttatcggcatctccgtgaaggaccaggctgaggaagcgttcgaatttcagttcgccggatccaggtctgcggtgcggaagcgttctgccaaatacggctgccatctgttgctgaaaatgatggaaaaataagcggaaaccggattttcggaatatctttctttcgaaaaaggccattccattttaggagatcgatttttcctcttaaaaaaatcgaatatgcgttcgcttttttcttggcaaatccgcataaacaaggtatagtagatatagcggaagtgataaaggaggaaaatagaatgagtgatcgtcaggcagccttagatatggcgcttaaacaaatagaaaagcagtttggtaaaggttcgattatgaaactcggcgaacaaactgaaacgagaatttcaacagttccgagcggttctttagcgctcgatgcggctcttggagtgggcggatacccgcgcggccggattattgaagtatacgggcctgaaagctccggtaaaacgacggtggcgcttcatgcgattgccgaagttcagcagcagggcggacaagcggcgttcatcgacgccgaacacgcgcttgatcccgtctatgcacaaaagctgggcgtcaacattgatgagcttttgctgtcacagcctgatacgggcgagcaggcgctcgaaatcgctgaagcccttgtcagaagcggagcggtggatatcgttgtcatcgactctgtagcagcgcttgtgccgaaagctgaaatcgaaggagatatgggggattcccacgtcggtttgcaggccagactgatgtctcaggcgcttcgcaagctttccggagcgatcaataaatcgaagaccatcgcgatctttatcaaccagattcgtgaaaaagtcggtgtcatgtttggaaatcctgagacgacgccaggcggaagagcgctgaaattctactcttctgtccgccttgaagtgcgccgcgcagagcagctgaaacaaggcaacgacgtcatggggaacaagacgaaaatcaaagtcgtgaaaaacaaagtggcacctccattccggacagccgaagtggacattatgtacggggaaggaatttcaaaagaaggggaaatcatcgacctcggaacagagcttgacatcgttcaaaagagcggtgcatggtactcttatcaggaggaacgccttggacaaggccgtgaaaacgccaaacagttcctgaaagaaaacaaggatatccttttgatgattcaagagcagatccgggagcactacggtttggatactggaggcgctgctcctgcacaggaagacgaggcccaagctcaggaagaactcgagttttaatcatgaaacgtgtgaaaggctgccggcccgatcggcagccttttactttattcttcgctttcaggcgcttctcttccatccatcctcttcatgagggcagtttgaaaggcgtttaatccagaaacgttaagaccgtaagcttgacaagtatttcccacacaattacaatgaaattgtatcacttgtttttcttaacatgattgataaacatttaaacttgacaagggctgtgaatccgcttcactccctgtgaaggttctgtatgttgagaagaagtacaatgtacatgccgacacttacttttagcaagacaagttcatagcaagaggaggtgaaagttatgagtcctttagcaattctcatctccattttgctgagcctattctgtttagttgttggctactatgttcgtaaaatcattgccgaagcaaaaatttcaggtgcgcgaaatgcagccgaacaaattcttggagacgcaaagcgggatgctgaagcgttgaaaaaagaagcccttcttgaagcaaaggacgagattcatacgcttcggatagaagctgaacaagaagttcgtgaaagacgaaatgagcttcaaaaacaagaaaaccgtttacttcaaaaggaagagaaccttgaccgaaaagatgaatcattagataaacgggaagcgatgttggagaagaaagatcattctctgaatgaacgacaacaacatattgaagagatggaaagcaaagtggatgaaatgattcgtatgcagcagtcagagttggagcgtatttcaagtctgacgcgagatgaagcgaagcaaatcattctggaacgggttgaaaacgagctttcccatgacatcgcgatcatgatgaaagaaagtgaaaatcgagcgaaagaagaggctgataaaaaggcgaaaaatattctttcattggctttacagcgctgtgcggcagatcatgtggccgagacaacggtttcagttgtcaaccttccaaatgatgagatgaaaggccgcattatcggacgtgaaggacgtaatatccgtacattggaaacattgacggggatcgatctgatcatcgacgatacgccggaagccgttatcctttcaggatttgatccgatcaggcgtgaaacagccaggatcgctcttgataaactcgttcaggatggccgcattcatcctgccagaatcgaagaaatggttgagaaatcccgccgtgaagtggatgattacatccgcgaaatgggtgaacagacgacgtttgaagttggagttcacggtcttcatcccgatttaatcaaaatcctcggccgcttgaagttcagaacgagctacggacagaatgtactgaaacattcaatggaagtggcgtttctgacaggcttgatggcttcagagctcggagaagacgtaacgctcgcaaaaagggcaggacttcttcatgatatcgggaaagcgattgaccatgaggtggaaggaagccacgttgaaatcggtgtggaactggccaccaagtataaagagcatccagttgtcatcaacagtatcgcatctcaccacggagatcaggagccgacttccatcatcgccgtgctcgtggccgcagccgatgcgctgtctgccgcaagaccaggcgcaagaagcgaaacgctcgaaaactatattcgcaggcttgaaaaactggaagaaatctccgaatcatacgaaggtgttgaaaaatcattcgcgatacaagcgggacgagaggtgcggatcatggtcaaacctgactcaatcaatgatcttgaagcccatcgtttggcgcgtgatattcgaaaacgaattgaggacgagcttgactaccctggacacatcaaggtaaccgtaatcagggaaacgagagccgttgaatacgcaaaataaagtggtgcgaatgcgccactttatttttttgtttccttgtgtaacactataattaaaacctatttaaaaaaagaaagggtcaaattatgagaattttatttattggagatgtcgtcggttcgcccggcagagacatgatcaaaacctatttgccgaagctgaagctcaaatataaaccgaatgccgtcatcgtcaacggagaaaacgccgcacacggaaaaggcattaccgaaaaaatatatcaccagctcattcaagctggagccgacgttctcacgatgggaaaccacacatgggataaaagggaaatatttgattttattgatgatgcgccgcagatcgtcagacccgccaattttcccgaaggcacgcctggaaaaggcatcacatacataaaaacaaacggttcgaaggaactggctgtgatcaatttgcaaggccgcacttttctgcctgcgatcgattgcccatttcgaaaagctgatgaattaatagaagaagcgtcaaaaagaacgccgttcatctttatcgattttcatgccgaagcgacaagcgaaaagcaggcgatcggctggtatacggacggccgcgtttcagcggttgtcggaacgcacacgcatgttcagacagcggacaaccgcattcttccgaaaggcacggcatatataacagacgtggggatgactgggccttacgacggtattctcggcgtcgaccgcgagacgattatcaagcgttttaaaacgagcctgcccgtccgttttgagattgccgaaggccgcacaactctgagcggagttgtcatcgacatcgacgaacagagcaagaaagccgttaaaattgaccggatattaattaatgacgaccacatgttttttgaataactaaacagaaaatcattttagaaaaatattaaaaggaaagcaggaatatcccggtcctatcgtgaatatagtaaaaatggaaggtaccctgctatttttgaaaagcaattaaaaggggatggctttgaaaatagcaacatctaataatgattgttctaatgaacactcacttatccattgtaaacttaagggggagcaggaatggaaatattaaaggtttcagcaaaatcaaatccaaactcggtcgcaggtgcgctcgcaggagtcttgagggaacgaggggctgcagaaattcaagcaatcggagctggggcattaaatcaggctgttaaagcggtagcgattgcacggggatttgtagcgccgagcggagtcgatctgatttgcattccggcgtttacggacattcaaattgacggtgaagaacgaacagcgattaagctaatcgtagagcctcgctgatagaaagatcactctttttcaaatgcttcaacctgcttacttttacgtaagcgggttgtttttggtttgtccgtttttgaaaaatcagccgggagaggatcaacatgaagatttttgatgcccactctgatttgctgctgaagctctggaaaaatccgaagctcaatgaatacagcgacccgtcgcttcaaacgccggtccaagcgcttttaaacggaaaggcgaaagtgcagtgtctggcgatttttctgcctgaaaccgtgccagacacaataaggcttgaaatggcgcttatgcagatccagctgtttcacgaaaaaattgcaaagtacaagcggatcaaactgatcaaaaataaagccgatatcgacaagctcaaaagcgatgaaaccggcatcattttaacgatggaaggctgtgagccgatcgcaaaaaacttaaggctgtttgacatcttttttcagctcggagtcagaagtttcggcctgacatggaactgggccaatacgttcgcagacggcgctttagaagaaagaaacgccggcttgacttcttacggggaaagactgattcgcaaggcgaacaaaaaccgggcatggacagatctctcccatttatccgaaaaaagcttttggggtgcgattgaaacggcggcgtatccgatcgcctctcattcgaatgcccgcagcctttgccctcatccgagaaatttaaaagacgatcaaatcaaagcgcttattgataagaacggcgtcatcggcttgacatttgtccctgaattcgtgagaaacggaaaaacgcctgtgatcaaagatatcctctcgcatattgaccatgtctgctctttaggaggcgagcggcatatcggattcgggtctgattttgacggcatcgaccgtgtcattccgaatcttgaagcccacaaagattacgggaatctgatcgaagcgctgcagcgctcatatacaccaagtcaagtcgacggatttctctttcaaaatttcatcagccgcatcccattttaaaaaaatatcatacatttttcagagggtgttcatctgttttctccagaaggacactggtgtttaccaagactgattatcgtgctacaatccttttgtaaagcgattttacaaagggggtctgttcatcttggacggaaatatgaaagcgcttatcaagaagccgggggagccgggcgccagcttcgagctcgtcccgattccgaagatcgacaaacacgaggtcctgatcaaagtcaaagccgcatcgatttgcggaaccgatgtccatatttataattgggatgaatgggcgaaaagcagggttaaaccgccttatgtgttcggccacgaattttccggcgaagttgttcaagtgggggaaaatgtgactacggtaaaagaaggggagtatgtttcggcagaaacgcacatcgtttgcggaaagtgcctgccgtgtttgaccggaaaagagcatgtctgcaaaaaaacgctgattctcggtgtcgatacagacggctgttttgctgaatatgtcaaaatgcccgccgcaaacatttggaaaaacccggccggcatgcctgaggatctcgcttctattcaagaaccgctcggaaatgccgtgcatacggttctgacgggaatgacggctggagtgaaagtcgctgtcgtcggctgcggaccgatcggactgatggccgtggcagttgcaaaagcgtctggggcggcgcaggtgatcgccatcgataaaaatgaatacaggctcgaccttgcattgcaaatgggggcaaccgatatcatctccgttgaaaaagaagatccgctcaaaaatgtaagcgctttaacaaatggtgaaggggcggacttggtttgcgaaatgtcaggccatccgacggcaatccgccaaagtttaaaaatggcggcaaacggaggacgggttcatgtcttaagcttgcctgagcatcccgtatgcatcgacatgacaaatgatatcgtctttaaaggattgacggtccaaggaattaccggccgcaaaatgtttgaaacgtggagacaggtcagcggtctcctccaatccggcacgattcaaatcaagcctgtcatcactcaccgtttcccgatggaagagtttgaaaaaggctttgaactgatgagaaaagggcaatgcggcaaagtcgtactgataccgtagaaaggagagattaatatgaaagaattcaattttttagcttccgagcttaatacaatgaaagaaaacggaacttttcaagagctgccgatcatcgaatcaatgcaaggatcaaccgtcaaaatgaaaggaaaagacattatacagctttcatccaataactatctcgggctgacgtctcatccgcgcctccaaaaagcggccgaagaggcggtcaaacggtacggagctggaaccggatcggtccgtacaatagccggaacattcaccatgcatgatgagctcgaaaagaagcttgcttcatttaaaaacactgaagcggcactcgtattccagtccggatttaccgcaaatcaaggcattctttcaagcattctcaccaaagatgatcttgttatctcagacgaattaaaccatgcttccatcattgacggcatcagactcaccaaagcgggcaaaaaagtatatcagcatgcggacatggaagatttagaaaagattttgaaaaagtcgatgaactacagaatgcgccttatcgttacagacggcgtgttttcgatggacggagacatcgcgccgctgcccgaaatcgtccggctcgctgaacagtatgacgcatttgtcatggtcgacgacgcgcacgcgtccggcgttctcggcgaaaacgggcgcggaacggttcaccatttcgggctggacgggaaggttcacattcaagtcggcacactcagcaaggcgatcggcgtattaggaggctatgcggccggatccaaggtgctgatcgactacttaaagcataaaggaagaccgtttctcttcagtacttcccatccgccggccgtcactgcggcatgcattgaagcggtcaatgtgctgatggaggaaccttcattgattaaaaagctttgggacaataccgcgcacttcaaaaaagagcttgaaaaaatcggccttccgctgattaagagcgaaacgccgattacgccgattttgatcggtgatgaagctgcggcatgccgcttctcaaacacgctttttgagctcggtttatttgcccaggccattgtatttccgaccgtcccgaaaggcaaagcgcggatcagaacgatcatgaccgcccagcattcgaaagaagagctcgataaagcgcttgaaatcattcaaaccggcgctaaaaaagcgggtctgctttaaactcatcgatttctttttgaacaaagcaaataaccattgataatcattttcagttagtgtacaatgatgggttctgggttgtgctgacaaccgagaacctttatactgaagagtggagctttgtttgaaaggagatcaaaaacatgaatgagaaacagcgcattgaaagcggacaggtcaatccatcggacaaaaaatccgagaaggattacagcaagtacttcgaagctgtttatgttccgccttcattaaaagatgcgaaaaaacgcggcaaagaagaggttaaataccataacgattttaaaatctcagagcagttcagaggcatgggcgaaggacggaagttttacatccgcacgtacggctgccagatgaatgagcacgataccgaagtgatggcagggattttcatggcgctcggctatgaaccgaccgactcgacggaagatgcaaacgtcattttgctcaacacgtgtgcgatccgggaaaacgcggaaaacaaagtgtttggcgaaatcggccatttaaaagctttgaaaaaagacaatccggatttgatcctcggagtctgcggatgtatgtcccaggaagaatcagtcgtcaaccggattttaaagaaacatccgttcgtcgacctgattttcggtacacacaatatccaccgcttgcccgaacttttgtcagaggcttatctgtcaaaagaaatggtcatcgaagtgtggtctaaagaaggcgatgtcattgaaaaccttccgaaagtccgcaccggcaaaattaaaggctgggtcaacatcatgtacggctgcgacaagttctgtacgtactgcatcgtgccgtacacaagaggaaaagaacgaagcagacgtcctgaagacatcatccaggaagtgagaaggcttgcggctgaaggctacaaagaaatcacgcttctcggacagaacgtcaacgcctacggcaaagattttgaggatatggaatacggactcggccacttgatggatgaactccgcaaaatcgacattccgcgaatccgcttcacgacaagccatccgcgcgattttgacgaccatctgatcgaggtgctcgcaaaaggcggaaaccttctggaccacatccatctgcctgtccagtccggaagctcggatgtcttgaaactgatggcgcgcaaatacgaccgggagcgctatcttgagcttgtcgccaaaattaaaaaagcgatgccgaacgcatccttaacaacggacattatcgtcggcttcccgaacgaaacagacgagcaatttgaagaaacgctctctttatacagagaggttgaatttgacagcgcctatacgttcatctactcgcctcgcgaaggaacgcctgctgccaaaatgaaagacaatgttccgatgcgcgtgaaaaaagaacggcttcagcggttaaatgaagtggtcaacgaaatttccgcgaagaaaatgaaggaatatgaggggcaggttgtcgaagtgttagtagagggtgaaagtaaaaacaaccctgatatccttgccggctatacacggaaaaacaagcttgtcaacttcaaaggaccaaaagaagcgatcggccagcttgtcaacgtgaaaatccaccaggcgaaaacttggtcgcttgacggggaaatggtaggagaagcaatcgaggtgaagtaaagtgacgctttatacgaaaaaagagattgttgcaaaagcgcgggagctcgcaaaaatgattgcagaaacggaagaagtcgactttttcaaaaaagcggaggcacagattaatgagaatgccaaaataacgggcataatcaaccaaatcaaagccctgcaaaagcaagccgtcaactttaaacattacgaaaagcacgaagcgcttaaacaaacggaagcaaagattgacgcgcttcaggaagagcttgacgagattccgatcattcaagagttcagagactcccaaatggaagtcaacgaccttcttcagcttgtcgcgcatacaatatcaaaccaagtgacaaacgagatcatcacatcgaccgggggagacctgctgaaaggcgagaccggttcaaaagtgaaaaattcatcaccgagctgttctctataatttggcggcgccttttaaggcgccgttttttttgaattcaatttcccgccgcgacggcttattgaaaagattcgtttttcggctgtctttttcttttctgatttaagtcaagtttatccttttacctgcatacacttaaacagattcattatatgggaatttattttgatttctcaaggaacgcacattagacgaatgcccagcataggataatacgaggaaaaacaaggaggcatgaccgaatgtctgaatacagggaaattatcactaaagcggtggtcgcgaaaggccggaaattcacccagtccactcatacaatctccccttcgcaaaagccaaccagtattttaggcggttggattatcaatcataagtatgacgctgaaaaaatcggaaaaaccgtggaaattgaagggacatatgatatcaacgtctggtattcatatgcggacaacaccaaaaccgaagttgtgacagaacgcgtttcctatgttgatgtcattaagctccggtatcgcgacaaaaattacttagatgatgaacacgaagtcattgcgaaagtgcttcagcagccgaactgccttgaagtgaccatttctccgaacggaaacaaagtggttgtacaggcggaaagagaatttttagcagaggtcgtcggcgagacgaaggtcgtcgtagaggtcaattctgattggacggaaagcgatgaagaagaagcgtgggaagaagagcttgatgaagaacttgaggatatcaatcccgagtttttggttggagatccagaagaataaaaggaagctagggaaacaccgccctagtttcttttttttcagcacgaatctttatggtataatgagtgttggaatcaatagaaacgtttatacatagtgagggattaaatatggcaggctacacgcctatgatacagcaatatttaaagattaaggcagagtatcaggatgcctttttattttttcgtcttggcgacttttatgagatgttttttgaagatgcaaaaaaggcgtctcaggagctcgaaatcacgctgacgagcagggacggaggatcaagcgaaagaatcccgatgtgcggggttccttatcattcctgctcttcgtatatcgaacagctcattaaaaaaggctataaagtcgcgatctgtgaacaggtggaggaccctaaatcggccaaaggagtcgtcaaaagggaagtcgtgcagctgatcacacccggcaccgtgatggacggcaaagggattcatgaaaatgaaaacaactttatcgcctctgtcagtaaatttcagcatacatacgggctcgctttttctgatttgacgacgggcgagaatttagtaacggctatcgaaaggcttgatgatgtcgtttccgagatttactctgtcggagcaagggaaatcgtcgtcagccgcaaccttgacgagaaagacgtcgcaatgctgaaagagcgctgcggcgccacgatctctttcgaggatgaacaagcggatgaagtgcctggcattgtgaacggactggggtccaaagagcttgtcgatacgtttatgaggctttacgtctacttgaagcggacgcagaaaagaagcctcgaccaccttcaaaacgttcaggcctacgagctcgaagaagcgatgaaaatcgatttgtactcgaaacgcaatcttgaactgacggaaacgatccgttcgaaaaacaaaaaaggctcgcttctttggcttttggatgaaacgaaaacggccatgggagggcggctgttaaagcaatggatcgacaggccgctgatcagaaagggacagatcgaagagcgccaggaaatcgttgaaacgctgatcgcccatctgtttgagcgggaagatttgcgcgaacggctgaaggaagtatacgacctcgagcggctcgccggaagggtcgcatacggcaacgtcaacgccagagatttgatccagctgaaggaatcgctgaaacaagtcccggccatcaaacagcttgtcggctccctcgaccatccgaaagcaaaagcgcgcgccgagaaaatcgatccgtgcggcgatcttttgaatcttttggaagacgcgctatacgagaatccgcctctttcattaaaagaggggaacttaatcaaagacggctaccacgcgaaactggatgaatacagggacgcaagcaagaacggaaaagactggatcgcaaggcttgagcagcaggaacgcgagtacacgggaatccgctctttaaaagtcggctttaacaaggtgttcggctattatattgaagtgacgaaagcgaacatccatctgcttgaagaaggccgctatgaacggaagcagacgctgaccaatgcagaacgctacatcacgccggagctgaaagaaaaagaagccctgattctcgaagcggaaaacaatatttgcgagctggagtatgagctgttttccgagcttcgcagcaaggtgaaggaatatatcccgcgcttgcagcagctggcaaaaatgatgagcgagcttgatgtgctccaatgttttgcgacgatcagcgaaaaccggcactatgttaagccggagttttccgatgatgtcgttcaggtgatcgacggacggcatccggtcgtagaaaaggtgatggacagccagtcttacgttccgaacagctgtgaaatgggcaaaggcaggcagatgcttttaatcaccgggccgaatatgtccgggaaaagcacgtatatgagacagatggcgctgatctccattttggcgcagatcggctgctttgttcctgcgaaaaaagcggtgctgccgatctttgatcagatctttacgagaattggcgcagcggatgatcttatatccggacagagcacgtttatggtggaaatgcttgaagccaaaaacgcgatcgtccatgcgacgaaaaacagcttgattttatttgacgaaatcggccggggtacgtccacttacgacggaatggcgcttgcacaagcgatcatcgagtacgttcacgagcacatcggcgcgaagactttattttccactcactaccacgagctgacgtcccttgaagaaaagctggacgatttgaagaatgtccacgttcgtgcggaagaatacgaaggaaaggtcgttttccttcaccagataaaagaaggagcagcagataaaagctacggtatccatgtcgcgcagctggctgaattgcccgacggtttgatcagcagggcgaaaacgatcctgaaagaacttgaatccggcgcaaaagaagccgctccatcaacggcaccgaatatggtaaaagaggcggcggaagaagccgcggcgactgttgcagatcaaccggcccagctgtcattttttgagacggacaagccaatagaaaaagagacgaagctctccaaaaaagagcaggctgttttagccgaatttaaagcgatggatctgctcgatatgacgcctatacaagtcatgaatgaactgtacaggctgcaaaaaaaattaaagtaacaaagaggtgagccaacttggcaaaaattgttcagctgcctgacgatttatcgaataaaatcgcggcgggtgaagtagtggaaaggccggcgtcggtcgtcaaagagcttgtcgaaaatgcaatcgatgcgaacagctccgtgattgaaatcgatgttgaagaagcgggtctcgcctcgattaaagtgcttgacgacggcgaagggatggacgcagaagactgcagaacggcttttttgcgtcatgccacaagcaaaatcaaagacgaaaacgacctgtttcgcgtcagaacgctcggatttcgcggagaagctttgccaagtatcgcgtctgtctcacacttaagcattaaaacgagcaccggagaaggggcaggcacccatttgacgctgcaggggggaagaatcatttccgagcaaaaagcgccaagccgcagaggaaccgaaattacggttaccaacctgtttttcaatacgccggcaaggctgaaatacatgaaaacgattcataccgagcttggcaacatcacagatgtggtcaacagaatcgcccttgcccatccggaagtttcgatcaggctgcgtcatcaagggaaaacgcttctgcagacaaacggaaacggcgatgtccgccacgtgcttgcggcgatttacggcacggcggttgccaaaaaaatgctcccgcttgaagcgagatctcttgactttgaagtgaagggctatatcgctcttcctgaaattacgcgcgcctcgcgaaattacatgtcatctgtcgtcaacggcagatacattaaaaacttcccgctcgtaaaagcgatccacgagggctaccatacgcttcttccgatcggccgccatccgatcacgttcattgaaatcaacatggacccgctccttgtggacgtcaacgtgcacccgtcaaagctggaggtcaggctgagcaaagagacggagcttcacgagctgattcgcgacgccatcaaagacgtctttaaacagcagcagctcattccaagcgtgcaggtcccgaaaaaaaccgcacctctgatcaataaaccagagcagcaaaagcttgatttcgaccaggtacgagaaccggcacctctttctgattctgatgttgaaagagagtataagccggagccttcgttttcggcgatgaaattaagctcgcttgtcaaagacccgccgccttccgctcccgtagagcgcgaagaaaacgtaatgcaggacaccgagcctgaatggcccggagctgaagagtatacgcctgaagccgcgccggccgtacaagcagaaccggaacaggcaggagagaacgtccaggacgaagagacgccaaaagaaagggtgccgatcatgtatccgatcggccaaatgcacggcacctacatacttgcccaaaatgaaaacgggctgtacatcatcgatcagcacgccgcacaggagcggatcaaatacgaatatttccgtgaaaaagtcggggaagtcgaatcggaagtccaggacctgcttgtgccgctgacattccattattcaaaaaatgaagcgctgacgatcgaccagcacttggacgatttagccaaagtcggcgtctttctcgaatcgttcggcgccggcagctatatcgtccgatgccacccgacatggtttccgaaaggggaagaaacgacgatcattgaagacatcattcagcaggtccttgatgaccgcacgatcgacatcaaaaaactgcgcgaagaagccgcaatcatgatgagctgcaaaggctccatcaaagccaatcatcacctgcgggacgacgaaatcaccgccctgctcgatgagctgcgcagaacatccgaccctttcacatgcccgcacggccggccgatcatcatccactactccacctatgagatggagaagatgtttaagcgggtaatgtaatttttaatcgctcacaacctttggtatatcaatggctgtgggcgattttgattttattgaccacattttgaccgcattaacactagacggcctgctttaaatcttgccgtctgtaagaagacaattaggaagcggcacgtatatcgtccgggtattctgttttatggatgattgtaagctataattctaagaaaatttggataaccaaaagagggcttctctttgagatcaggtctcataggcaaccattagtcagatttcgcagctgttttcatttttctagaaaatgttataatgaaaagccacgaaatgacttgaagagggggaattttgatgcattacataacggcatgcttaaacatcatcagcgataaagaccttaatgaaataatgaaggaattcaaaacacttgaggaaaaaacgaacaaagaagaagggtgtattcaattccatgcttatccgcttgaaccgtcggagcgcaaaataatgctctgggagatttgggaaaacgaagaagctgttaaagcccatttcacgaaaaaacacacaaaagatgttcaaaatcaacaattaacagaagtagaatggttaatcaaaagcaatgtgaatgattaaagcgcgaaacattcaatgacgaaaaattaacccccgtaatcgagtggaaaattgttggaggattgttgtccaacgctgccaacagtcatcattttcatttagaaatcatcagattattcatagcagtgattagaaaatttttttgtccgaggtactgtaatgatttgattcactgcatgatatgaagggatacaaaaagctcggttctgtcgatgtcaccgatgaaatcggtacaggcaaggacttcatcggcggttcgtacatgctttattcaaacggtcaaattgtccgaaaatacatatccggcggtgaagtgaaatacgaacttgtcagtcgcataccggaaagcagagtgaagaaaagcaacattgaaaaagctcttgattgggctaaagacacagttggggaattgtccggtggttatgatggttatagagcgataacaggtgttgaccctgtgactggtgaaaaactaaccgtcactgaccgtatcctgtccggtgtttctgtcatacccgctactaaagtagtcaaggtagggaaatatgctttcaaagccactaaaggtgcgaagacggcgaaaagggtttcgaatgccgagagaagtgctaatgctacgcctaaaattaatagaaaacaagctctcaatcaggcaaaagacttagctggcaacaacctacacgtcaatggcaggttggcgatgatataactaagaagggtgtagactataaaaactataaatatagttcaaatccaacccatcatggacgttactatgagtacgaaactcctgaaggattaagagtggttgttacccatactaacgataacagattacacgcacatgcaggtaagcctgacaaagaggcaaatcaattcaactatgactttaagaaagagagatatactaatatatacggtcctaatggagaccaccatatatactataaataaaaggtgaggaagttatgtcgtctcgtaatgaaattattaaacaaaaaaagcgataatgaatgcaaggaaatcgatgaaggaatttacttgcttagaactattagattttgaagagtttgattctccttggatagacttgttcgagccattactaaaacaatttcgaagaatagattccaaaccaacttattataaattaattggggattctaaagaaaacaatattttatggatagaaaattccctaagtttccttaaacaaaaaaaagagtggtttatcgttgttcccaaatgtttacaaccagtgtgggcaaatgttcgagttttagactattctaaagcaattcatgagctttgggaaatgtcagaacctgataatttcctaattgctgataaatctacaggaatgattgcaaaaatattttttgaagaacaacaatacgagatccatattggaaaatgtagtcttgataacattaaaaagaataactaagagaactatttaaacaccttgattggcaactgcctatcaaggttttttcatattcaaatccgacaaaaagggggataaaatgggggactttttctattccactttgtcatacgatagagacaagaaaaacgaacgtgaatatcgagtccaagaaggagagcctgcggacactgaccttttgcatatggatgttgtgcagctgattggtggccgcttttttattggccagaatgggagacgcacctttcccttatcaagtgtgaactcggatgtatcgaatgatgatgaaggtcgtcagcttcacaggaggaacggctggaggctggagtctatgcaggattgcgcgcgatagtcaggggacgcagggaagtccttataagaacaaaaagaaaagcaggcaaataacctgcttaaaaactgattttgcccttgaaatagactcgcaaaatcaaatctcgggtctttctgttaagcaaagagagagccaacaaagcgagaaagagttactttgcgatgcaatttttaaattgccgctccagttcctctttgtccaagtcctttccgatgaaaacaagttcgctttgttttttctcgttttcgttccacttccggtccggacgtcctgaaaacagcatatgaagcccttggaatacgattcgatattcttcgcctttaatataaaggatccctttataacgcaataaatcttctcctttttcccgtacgagataactcatccaatgatccacctttgccaaatcaagaggcttctcttcccgaaaagcgatagaagacactttatcatcgtgatggtggtgatgatgatcttctagaaaatgaggatcgatttcaatttttcgattgacgtcgaacgtattgatccccagtatatctcttaaattgaccttgcaatctctggcatacagcctcttagccgtaggattaatgttgacaagtctttgctccaaggatttcagctcgttattcgatactaaatctgttttattgaggatgatgacgtcagcaaatgcgatttgctcttgcgcttcatcctgatcatccagatgtctggtgacatgcttgctgtctactaccgtgacgatgctgtcaacttcaaatatttcggatagcagttcatccatgaaaaacgtctgggcaacgggggcaggatcagccagtcccgttgtttcgattaaaacgcgatcaaatgcaactttcccttgatccattgagaatacaagcgttctcagaatgcgaatcaaatctccgcggaccgtgcaacagatacagccgttgttcatttccaaaatttcttcttcagaatcaacgacaagctggttgtctatcccgacttctccgtactcattgacaataaccgcgatcttttgattgtgcttttctgtaagtattcgatttaaaagtgtggttttcccggcgcctaagtacccagtgagaatagcgacaggaattttctttttagttataggcatgatcattcgactccatttaaaattttttcgatactttgattactttttcttttggaactccggagatgacgccggatgaacgttcgaagcgttggccgtcatacaaatggcttgctttttctttataatcttcattggtacaaagcgagtcaatcaggagggggacatcctcaggttttaaatctctataccaagttcctctcgggtaatggatggccacgcacttatcttgacaccttccattacaccgcgtgcgcgttgtatgaatgaaatcatcaagctcccggtccgagatttcttgccgaatcacttgagtcagttcctcagctccggcccgattgcagctgctgccgttgcagataaaaatatgatgtttcatattacttaaatcccatgtcgccatatgtatcttccctccaaataaaacagaattattccgatttgtaagcgataaaatgataaagaactgagaatgaatatagaggcgccccggtcgatcactgtccgaaaggtgatactcataacggggagacggccccggcaacatccgcagtatttcactcctttcgaaaagctccatatatttcagccttcttttgcgcctttggttatttcaatactacaacaaaacgtaattattacgatttgaaaatcattttatctctttttcaagtcaaacgcaaatagaagaggttaaacggtgccaatgagatctgtgcagcttctttatccagccgcaccttggcgcaaaaaccccttgagcaatcaaggggttttttatctatagcaatttttccattgccattacatcgataaaacgtccatctaaaattccttgatttttaaagatgccaacttgcctgtagcccattttattgtataggttttgcccaagttcgttaaagggaaatgtaaagaggacgattttataaaaactattctctttagctgttttttctagagcttgaagaaggaggccgcctattccttttccgcggcatgcacgatcaacatagacagaaaggtcggcaacaccttgataagcacaacggtgggagtacgggttcaaagaagcccagcctacaatttctccttttgattcggccacaaggacagaatagcgcccttgatgttcctgaaaccatatttcgatatcgctcatttcctttaaatcttgctccagagtcgcaattcgatcttcaatgccctgattataaatagttaagataaatggcaaatcggcagaaatagcttttcgaatgtttatgttatgcatgagttcctccgtagaaggacttcgagtgcagcatcatatgataagttggtcactaaattgtccgcaagtttttgaaagcgcgttcgttattgtttgcttgacggatctaagcggaattggcaacagacagggtaaaagagagcaggcctaagctttgctctctatttttttgacacttcatctttgaataaatgtttctatttcccgttacttgatatcgatggccgaagctttattgtcccaatcagaagccatattagcagttttgccgtaccaatcggaatgtctaaacaaaacgcctttgccgtatccttgagttgaagtatgctcccacagcgtcgttgaatagcttgatgaaggagacgccgtacttaacgatgaaattctgtcattccagctggatggcaagtttttaaatccgtctctccagtaaatatactgcccgcctttatttttatattcatagaaatcggtacagcagggaccgctggcagaaggtttgaattgcttctcaagcctctgcttgtctttcgcgataaaggcttctaaagtaaccttgctcgtaaatccatacgcaagcaaatcgccgttcttattctgcttgggcagaaccatggttactttgacatctctgacggatttggcgttggcttgagccggcgaatccacattttttccgtcaacggttaagtagtggaaagatttgaccgtatattgattccgctgctgatcgtccagtttcactttaacatcgctttcattttgcgacgcagcgcttgccgtcgacgcggaaatcaaacaggcagcggcaacgagtccaatcccaattgttttcttgaacttagttttaaacatataacaacactccctctcttaattttcctatttattaataggatggaaaaataatagcattaatagaatgaaaatcatgtctctttttgaaaaaaacattaattttctattaacattcagcagcaggagaggttcggtatctgtattgcattaaaaaaaggctcttttttaaaaaagagcctttcatgatggagtcaacaacggtaagcaggaggagaacatgtaaaataaggagaaggtcataagttattgctgacttttaaaacgaactttttagtagcctccatatccaccgccgaaccagctggcgccgatgatgattaagagaatgaacagaacaacaattaaagcaaaaccgcttccgtgtccgtaacctccgctcatatgtttcacctccctaaagagacatagtttatcctatgtcactttataaatttggtataggatattgatttacatttttaaaaatagttgaaccaacttcaccctcatgcgagtctcagatgaagagccgactatcatgaggacttcgtgcagagaggatgaaaatggtgattggcgtcctttaaacggaatataatgcaataaatccaccgaaaagggcgctgaataaattgaattttcaattaactgaaaaagacatgcttcgtatcatcaggaatggtcttcaaacggcacagtaccctaagcatatgatgatcgttggtgccgggttgtccggacttatcgcagcgtctttattaaagaatgccgggcatagagtgacgattgtggaagcaaatgacagagcgggagggcgtgtttttacttcccgtgcgccctttagcgaagggttgtatttcaatgccgggccgatgcgcatccccgatatccatactttaacgatggaatatattaagaagtttaatctgcctgtcaatgtgtttatcaaccgaacccccatggatattctttacgtcaacggcgtgaaaacccgtcttcatgagtttgaaaaaaatccgggcgttttaaggttccctgttgctccccatgagtagggaaaaacggcagaacagctgatgctttctgctttgcagcctatcctcaattttatcagccaagatccggcgagaaattggcgtattgttgaagaacaatacaggaacgaatcgttaggatcttttctcaacactcatttttcaagcggttccatcgatatgattggtgtgcttttggacatggaagcgtacatgggattgtcccttgtcgaagtattgcgggaatcgattttttttacatcgccgactcgcttctatgagattacaggcggcatggacctgttgacgcaagcttttcttccgcaattaaaggggaatattttattccgtcaaaaattgatgaaaatgtctcaaactaaaaacagtgtaacagcccattgcattcaccagcagtcggcagaacattcagcggtgacaggtgacttcgcgatcgtaacaatacctttttcagcattgcgatttgtggcatttgagccgtttgaatccttttcctaccaaaagcggagagcgattcgggagcttaactatattgcggcgacaaaaataggaatcgaatttaagagcaggttttgggaaagagtcggacagcgcggcggcagatcgattaccgatttgccgattcgcttttcatactaccctagcagcataggaggacacgggcatgctgtcattttagcgagctatacgtgggctgatgaagcgctaatatgggacagtcagcctgaagaagagcggatccgctatacgctgaaaaatttagcgaaaatatatggagatatcgtgtattctgagtttgtatcaggcgcttctttcagctggacgcaaaatcctttttcagccggagcatttacagctttcgaaccagggcaggaattagagttgtatccttatattccgatgcctgaaggaagggtgtatttcgccggggaacacgcttccctcactcatgggtggatgcagggagcgattgaatcgggaatacgggcggcgtatgaagtaaatcaggcctcccgcgtataacatgaactttgcaagtattttaatagaaagaaccgattttaagggatggggaagagtcgctgttaaaaagcggcttgttcgtttttattgagttaaacagacggatcttccaataaactccgccttctgaggggatgtaaatttgtttttgcttcctcaacagtaagaagtgtttccattcgtaaaaacaagtttttaagaacttcatttataaaaaattttaatgcttatgatacaattgaattgcagatgtaactcgacaagcaaaaaagtgttttgctgaggtgaatgatcggattgcccgcattttttcgttaagaaccctcctttttcttacaacaaaaaaagcccccaaaacgagttttcccttaggaaaggctcatgacataccggatggaatgacttaacattctgccgggcagaatagctaagaaaggattgaatcacattgaatgctgctcgtgatcgaaacatcatgcttttgcttctctgtttgacagcaggtattgtagatgtgattgggtacttaagtatcggtcacgtatttaccgctaatatgaccgggaacatcgtactgttaggattatcaatcggcaattctcttcatgcgaccgccgtgtactcgctgatcgcactgttcggatttatcatcggcgtgattatatcagcagccattgtcggaaaacaggaaaaatcgttctggccgacaggcgtcacgattgcacttgctgtggaagcagccgtattgcttctatttgcctgcctgactttctttgaaagttcgccgcaccttttaatcttgctgttaagcattgcgatggggcttcagactacggcagccagaaagctcggcattgcagggatttccactactgtcctaacggggacgctggcaaactttttcgaagatgtgacaaaacgattcctcagtaataacaaccaaaaggtcatccataaggacgcatggcttcgcgctttgacgattgtgctctattgcctgggggctgtcattgccgcacttgctgaacctgagcatccgtttgttgtgatttggattccgatcgttatcattatcggtattattgcggttgcaggcacaaggtttcacggaaagagtgagggatgaccagataaggacggttctatacaccggcattcgtgaaccatcgattgttacatatgttttatgaaggtgcaagtccgggtaataggacggggaaaagcaccagtatcggttaagattgggaggaggataaatggttggaacacattaatatggagcagtttattttattagcggccttattgctgattatcggtgtactgacaacgaaattttcgactaggctcggagtgcccgcccttgtattgttcttgattgtcgggatgatcatggggagcgatggtctcggaattatttattttaataatcccgagcttgcccagctgattggaattatcgcacttgtcgtcatcctttttgaaggcggtttgcaaacaaagtggtcttcggtcaaagcggtcgccgttccttcattgtcgctcgcgacgattggcgttttgctgaccacctgcgtggttgcggttgccgccaagctgatttttaatgtttcttggatggagggctttttattcggagcgattgtcggctctacagacgcagccgcgattttcgccgtattgaaaggccagaatattagagacagattgagctccactctagaagcagagtcgggtacaaatgatccgatggcgatgtttttgactttatcgctcatccagctgctgacggctgaccattcatcttatttcatgcttgttatttcatttttctggcagatgggaatgggacttttgctcggatatttactcgggcggttcgccagctttgccatcaataaaatcaacttggattcgagcggactttatccgatcttcgctcttgcttttgcgcttcttacctacagtcttacagatgtcatcggggcgagcggcttactggccgtctacattgccgcgcttgtcatcggaaatcaagatttgacttaccgacattccattttcaggtttaatgaaggctttgcctggatgatgcagattttgatgtttatcattctcggattattggtttttcctgcccaatttttatccttcgatattattttcaagggcttcttgctttccctgattttaatttttatcgcccggccggttgccgtttttctgtcgaccatcaaaatgggctttaattttaacgaaaaaatcttcttatcatgggccggattaaaaggggcagtcccgatcgttcttgcaacatttccgatgacgatggggcttgaaaacagccaattgatctttaatgtcgtattcttcgtcgttttaacatcggctttgatccaagggtcaaccatatcggtcttcgcagaaaaattgaaattgaacggaccgcagaaagtagaagcgccgcattcgctggagcttgtttccatcggcaaggcgaacgccgaaattatcgaatttgaagtcgatgaccaagcagccattaccaggcagatgctgaaagacatcagctttccaaaagatgccctgatcaatgcgatcatccgaaatggggatttggtcacgccgcatggagaaacgaaaattaaaccaggcgatattttatatatcctcgtatcgaaaaaacaaaagaaggaactgaaaaaatttttaaacagagaatttgattaagccgtcggaaaagcacagtacaaggcagacttgctcagtatgtcacgaataaaggtcaatgaagggtactgcaccggtattcttcattggcctttttttgccatgtggaagttcagctatatgataagtgacatttagacctttgttgatcaattgctcatatccatttataatttaaaaatcaaatattaggaggcgcatgaatgatgaagtgcaaaaaaataagtgggttaacattcgaggggaaagcgcatcattaaccctataaactgcgtgattcccctttaattttgggggtatcattcaattgaaaaacagtaaaatacaaacctttaaacatcaaaagaaggcattttggtggcttagctttgtcgctttcttcagcgtgatgaacgaaaccgtatttaatgttgcattgccggacataaaaaatcaattcggcgtgtcgcctgcggcggcaaattgggtgaatacgagtttcatcatttcctttgctgccggttcagttgtttacagcaggctttctgatatgtacggcgtcaggaagctgtttgtggccggactgctcatctatggcggaggctcatttatgggtttgttggctcaagcttatttcccggctgtgatctttgcgcgctttgttcaaggatccggggcttccgctgtacccgcgcttatcctggtcatcatcacgcgctatgtccgtccggagggccggggcaaagcattcggcattgtcggatcactggtggcaatgggcgagggaataggtccggccatcggcggaatgattgattgtacattatattcattggtcgtttctgtttattctgccgatggcagtgctgatggcgattcctttcttctttagaaatatgcctgatgaagccgctgcaaaagcaaacctggatatcattgggatcggactgctgacaatcagcattgtgatgttcgctgtatatatatcgctgtatcatgtcttttatttactggcgggcattttttgcttgattggagctgcagttcatacccgacatgcagaacatccgtttattgaccgttctttaataaagaatcgccgatatataggcgtcgttttggcaggatgtactgtattgggaagcgttgcgggaatcgtctctgtcgttccttatatgatgagagtcttgtttagcttaaatgccgatactatcgggagcggcatcttacttccgggcactgtgggcgttatctttttcggcgttgcgggcggagcccttacagatcgcttcggcagccggtttgtttttactcttggatggttattgatcttgtcaaccatggcagccgcgtcacaggtcggcgaccggacaccatggttgatgacgattatgctcgtgtttatatttggcggtctttcatttgtgaaaacggcaatttcaaacagtaccgcagaaagcttggaagaaaaggctgcaggcgctggaatggggatgctgaactttgcctgttttttatctgaaggaataggcgtcgcattagcaggaggcttgatggcagtgcacgggtttggctattctgcgcttccggcaatgaacgatgcctggagtgctgtattcagccgctcgtttgccatattcacagtttttgtattggctggcggattgctatatttattgacttgcaaacgcaaaaaatcttaggatattcgagtggttgggcgggaaagcccagccgttttttatgctgactcgattttctgaaacataatgaaaagaaaatcgtatttgatgtaaagcttcttgagaggatgaaaatgatgaaaagaagcatcggcacctttgaaattgacggactgacaattgaatattcgcgagtaggtgaagggaagccgattcttgtgatgcacggaggtcattcgaattgccgcgaggaatttgggtatcgagatctttatgagagccgattctctatcatcacgccttcccgtgcagggtatggccggacatcgaaagaaatcggggacagtttggaacttgcctgctattacatatgaaactgcttgatcatttaaatatcaagaaagttcatgtggttgcggtgtcagccggcgggccaagcggaatatgttttgcatccaaatactcggaaagagtagaatccttaattttgcaaagcgctgtcacaaagcagtggctgacagcgaaggatattgaatataaagttggtcagatcatctttcggccgcctgttgaaaaggccgtatggaagctgatatcggcgcttaacaatcgatttccggaatggatctttaagaaaatgctatcctcctttactacacttcctgctgatcaggcgatgctgaaagtcacggagggagatattgaagaaatgagaaaaatgaacaacagacagcgttcaagtcgagggttcttgcttgatttaaaaaatatagacgatttatctttccatcatttgaaggagatttcttgtccggtattaattatgcattgccgatatgatcgtgttgttccagccgagcatgcttttcatgcaaaaaaactgattcctttttcagaagtctatcaggcagacagctggggtcatctcatttggctgggaacagagggtaaatctgtctcacagaaggtcatcagctttttaaaaaccacatcatcttgatcataagatgaataaaattttaggatcgcagcctacccgcaaatgaagtagtgcaattttttaatcaagagcagaatgatctttccgaacagaactgatgaacgtcgtacaagacttgcaaataagatgaatgagaaatcctccctggccggttttcggagcacaagggaaacttatgtataagaatctattccgatagagggacaggtacgggatgaatcattgattaccgttgcctgcgatttcccaggggggagagagttggtaaacttgatatcatccgcgggtttgctttgcttggcattcttttagcccatagggaagtcgtctttggctgtggatatttcaatttgggcctgctgaatggatatggcgcagtttggcttgcggcaagcggcagcttcttcctaaactcgcgattgaaacgatgcggctatgcaatatggtgaaacgttgcatgaaaaacttaacattttaaaaatccagccgatatgatgaataaataactgcacgcttccggcaaatgtggtatggtagctagtaagtttaggaaaagggaggatattgatgatcatcgtcacaacagatacaatcgcaaatcaaaacattgtcgaagtcaaagggcttgtcacaagcagcatcgttcagtcgcggaatatcggaaaagatattctgtcagggttgaagtcagtcattggcggagaattaaaaaattacacccaaatgcttgaggattcgaaaaaagctgtgagggaacggctcgtgaatcaagctgaagagcttggagcaaacgcgatcgtcggtctaaggttcgaactgtctgcaggccagggaacctccgaactcatcggatatggtacggctgttgtaatcggctagcttgcaatcgaaaacgaaggcggcggctctcgttgccgcctcagcgagtcaagaaggcttccctgtctgtttcgtctctttatgtttttgagtcagatggggatactttctgtggatgacaaacgctatgatcgccatatataagccgtagacgccgacagagagcagcttgttttcgctgaaattggcacctgcgatagagacgacgagaacgttggggacttttccaagcgtcgaagccgcaaaaaagacagcccatttcaccttgcttaaaccgcagacgatattcatgacaacggctgggataaccgggatcagcctgcccaatagtacggctgtaaaagcattttggttaaaatacgcttcatattcgctcattttcgggtatttcgttaagtgtctgcgagccatgtctctgaatccgtaacgtgagaggaaaaacaagagcatggtgccgagcatagaccccgtcagcgtgatcagcacgccgtttgcgattccgaacaaggcgccgtttaatccggcaatgagcgcaaacgggacgatcgggaaaaatacacaggccgccacaagcagcatgctgaataataccgaataaacgcctccgtccctgatgacgtcgagccaggaatctttgcagacgaatccgaccgcgatgatacttgccatgatgatgatagtgaatagttttctgatcataccgctcccgctgcctttctttgtctttagcttctacatttgcaataaagcttcttctaagtgtgccaaaatctcgtcagtttttgagaggttgcaattgctgagcataatcagcacttttttctcatccatgtatcggttaattgagctgataaaaccgtggatttctccatcatgccatattttatacttattttgatgattaataaaccatccgtatccgatcgaattgttttgaatgagcgccggagaagggccttcggctgcaaaagcctgctttttgacgcggctgtaaagggcttctttcaaagcatcttttgagacaagcttctcggtgtaaagcgccctgtcccataagtacaagtcttcaacggttgaatacagcccgctttccccgtagccgtatacgataggcgctttgatcatttcacgattcaggcataaatatccgactgtaggcgaaatatcttccggagaagagaaaaaaccggagtttttcatgcctaaagggtcaaagatcaattgttgaataacgtctccataagcttcatttgtgatcgtttcaatgatttttgtaagcagtatgtatcctgaattactgtaattgaacctttgtcccggccgaaattcaagcggcttgtcaataaaacgtctgataaattggtccaacggtgcgcgctccagctcaatatcgagcaattcttcctctagaaaatcaggaattccggacgtatggcttaataaatgtttgatggtaatgctgtcgccgttcggatagccttctaaatagttttgtaccgggtcatctgtacgaagcagccccttttcttgcagctgcatgaccgctatagctgtgaattgctttgtcagtgaggcaatttggtagcgtgtagacggttcattcttcaccttgtccttacaattggcataaccgtatcctttcgataacagtataccgtttgaatctgccagcaaaatgctgccgtgaaaatgattgttggatgcttgttccattaaataatcatcaagatgttccgctgtatataccaataacaacagtcctttcatatctaattatgataagaagaaaacaataaacgatagttttgaaaggaaatgaagcaggaagcgcgaccaaaataacattataaaaatttttttgtattttccatcatttgcagaataatttaagctaaatttaaaataaggcaatttcatgacatccgttaaaacgagtgctgttttgacggatgttttttattataaaacgattgaaatataagtcggcagtaacgaaaaggggaataaagtcgtacacagccttaaactaagggctaaagttctgtgtttttttgcaaggaaaaggactatattagtattttttaattttaatttaattttgaagggtttttcctttatgatctataatatgttatttaacatagtgaaagagatttttaaatctttggtgctgtcatgaagcaaaaataacaggaggttaagaaatgggacataaacatatcgcgatttttaatattccggctcacggccatattaatccaacgctagctttaacggcaagccttgtcaaacgcggttatcgggtaacatatccggtgacggatgagtttgtgaaggctgttgaggaaactggggcagagccgctcaactaccgctcaactttaaatatcgatccgcagcaaattcgggagctgatgaaaaataaaaaagatatgtcgcaggctccgctgatgtttatcaaagaaatggaggaggttcttcctcagcttgaagcgctctatgagaatgacaagccagaccttatcctttttgactttatggccatggcgggaaaactgctggctgagaagtttggaatagaggcggtccgcctttgttctacatatgcacagaacgaacattttacattcagatccatttctgaagagtttaagatcgagctgacgcctgagcaagaggatgctttgaaaaattcgaatcttccgtcatttaactttgaggatatgttcgagcctgcaaaattgaacattgtctttatgcctcgtgcttttcagccttacggcgaaacgtttgatgagcggttctcttttgttggtccttctcttgccaaacgcaagtttcaggaaaaagaaacgccgattatttcggacagcggccgtcctgtcatgctgatatctttagggacggcgttcaatgcctggccggaattttatcatatgtgcatagaagcattcagggacacgaagtggcaggttatcatggctgttggcacgacaatcgatcctgaaagctttgatgacatacctgagaacttttcgattcatcagcgcgttcctcagctggagatcctgaagaaagcggagctgttcatcacccatgggggtatgaacagtacgatggaagggttgaatgccggtgtaccgctcgttgccgttccgcaaatgcctgaacaggaaatcactgcccgccgcgtcgaagagcttgggcttggcaagcatttgcagccggaagacacaacagcagcttcactgcgggaagccgtctctcagacggatggtgacccgcatgtcctgaaacggatacaggacatgcaaaagcacattaaacaagccggaggggccgagaaagccgcagatgaaattgaggcatttttagcacccgcaggagtaaaataaccatttaaacgaacccgggaatccccgggttttttgttgctgccgtaaggaagcgggaaaagtatacagcggcgctttttgaacatactaccttctattaaatgtattaaaaaggaggaagtgttttgtcaaatcagggcaatttcaaaaaaacgatctctctgcttgacctgattttgatcggcatgggtgcgatattcggatcggcttggctgtttgccgtcagcaatgtcgcttcaaaagccgggcccgctggaagcttttcgtggattatcggcggcgtcattatccttttaatcggcctcgtttatgccgagctgggagctgcgttgccgcggacgggcgggattatccgctatccggtgtatacccacggccaccttgtcggatatttgatttcatttatcacgattgttgcctatacaagcctgatttcgatcgaagtgacggctgtcaggcaatacgtagcctattggtttcccggtttgacgataaaaggttctgaatcgccgacgattatcggctggcttttgcagtttgcgctgctttgtttgttctttttactgaattattggagtgtcaaagcgtttgcgaaatcaaatttaattatttcggtttttaagtattttgttcctttgacaatcatcatcgtgttgatattccattttaaatcggcgaactttgcgggagaatttgcgccgtttggctttggcggggttcagacatccatttcgaccggcggggtgatgttcgcatacctcggtctacatccgatcgtttcggtcgccggcgaagtgaaaaatccgcagcggaacatcccggttgctctgctgatttgcatcattgtttcggcttgcgtctatacgatactgcaagtggtgtttatcggagccataccgactgatatgctaaatgacggatggaaagcgatcggcagggaattttctcttccgtttaaagatatcgcggtgctgctcgggatgggctggcttgccactcttgtcgttctggatgcgattttatcacccggcggaaacggcaatatttttatgaatacaacatcgcgcttggtttatgcatgggcgcggaacggcacattgttcaaaatctttgccaaggtgaataaaccaacgggaattccgcgtccgtcgttgtggctgtcgtttgcgctcgccgttttttggacgcttccgtttccgtcttgggacgcgctcgtcaatgtttgctctgttgccctgatcctctcctatgcgattgctccggtttcagcagcggcgctgaatgtgaatgccaagcagcttaaaaagcctctgcaaatcaaaggaatggctgtcatcgctcctgtctccttcatatttgcgtcgtatatcgtctattggtcagggtggaacaccgtgtcatggctgctcggatcacagcttgtgatgtttgctgtttattgcgcgtgtaaaaaatacgttccgcaggacgatgtttcgtttgcacagcagcttaaatcaagctggtggatcgtcggatattatgtgatgctcctgattttatcgtttctgggctcattcggtaacggccttggcctattgagaacgccggtcgatttaatcttgatcgcgctaggatcgattgcggtattttactgggcgaaatatacggcgctgccaaaggcagtcattgattatgatgagaaaaaagaagaaaccgtttaagtatgaaaaccccgctgtatggactgcggggtattcacacgtttttattacagttgcggaagatctttagccgtttcggcagctttggtatcaatctgaatttgttcagataaattcgcaggatggtaataccctttggaaatcatatagtttgtgatctgttcatgggtgtcaatcgcgtcgtttaaatactgcttaagcgtttcgcgcacttctggagaagatgtttccgtgatagctgtggcaatgtttttgacaccggtttttgccgagattaaaaaatcggtggcaatgacttgttcagtcatcgcgcccatgcctgtcatgttttggatgaattcgttcatacggtttcacctctcactgacaatagaccttgtaaatgctcgatctgatgctttgtttgggatgcatcacgctccaagatgtcgcgaagctcttgatcctgaaccattcccgtcattgttgatgactttgtcagacaaaggtttttaaacattaacagctcatgcagctccaatgtttcatggatcgcattattcaatcgcaaacattcctttcaaatttgttattgtgtgaaggacacatctttagtatcaaaattcgttagcgggattattcggtttgttattttacaataaatcacataatgatgtcagacttttcggacgcgaaagaatttggtcaagagccatgttccttgcggaaaactgagtgtgagctgccagacgccgccgccgtcaagtccgtattcggtgatcagctgcagtttttttccgatgctgcgtgcgtcttcaaaccatacgacatgccgtctgccctgttcatcggtgtatctgaaaaaaggggactcagaatttgtatcatattgaatcggtgcctggtgcttcatggcgagctgaacggcgtcttggttggcgattccggggtatacggcaccgggctgatagggcagggtccagttatagccgtaaagcggaaagccgagaacgattttttctttggggacatggcggagagcaaattgaattgtttgccggacttcattgatcggagcaatggggccgggctcgcttgtcccgtggtgccagtcgtatgccatgatgaagataaggtcgctcactgcaccgattccgccatagtcataccctttcagccaggcgatattttcatttgttttcggcggaacggcaatcgtcaacacatagccggacggcttcagccgctctttcaacaggcggagaaaacctgaaaataaatctctgtcttcctccaaaatctgttcgaaatcaatattgacgcctgcatatccttttctggaaatcgtttggacaatattgtcgatgaggcgatttcttacggcaggctgatttaatacgcggtgcgcaagagacggactgaagcctgattcagttagattggtgactgtcatgaggggaggaacgcgccgtctccaagccgtttgtacggccggtgaatcattcagctcgcttaacgatccgtcgcttgaaatgtggtattcaaaaaatgccagatacgtggcgtatggggcaaaattatgaatcaattcctggtctaaccgggggtttctcagtgtgtaatatcctaaagcagtgatcggttttttcggcaattccggaatcatcacttttatccccggcctcatattggaaggggttacagacggatttgctttttgcaatgcttcgacggatacaaacgtccggcgggcaatcgtgtaataactgtctcccggctgaacggtatatgtataaagcggtattaaaagagcctgtccggggacaatgtttgttgcgatcaacccattcgccaatcggatctggtcaatcgaaattccgaacttggcgccgatgacaaatagtgaatctcccggctggactgtataaataaacaactggcacacttccttttgttcctctgtatgtgacagggggttttatgctatgtctatgaccgttgcagaaggatcatgcgccgttttttacagctggaatggtgaatagaaccgtgaagcggataattcttgactgaacagttagaaagtgtatccttcaaataaaggaggtgataggggcttgggaaggagcaaagaatttgataccgctctcgtccttcataaagcgatggaggttttcggccaattcggctatgagggggcgtcgatgcaggagctgctcagccgcctgggaattgccaggcaaagtctgtacaatgcattcgggactaaaaggggtctgtttatcgccgcccttacaagatatctagatgataaaaatgcgcaagtgatcgccatgcttgaaagccccggatcagtgaagcaatcggttcggcagatcttccaggaaagcttaaacgttctgaaagaccccgaacgttcaaaggcatgctatatcatcaacagcgcaattgaacaaattccccgcgatccggaggttgccgaatacttcgataagcagacaaagcagttggaaaccgccttttacaaagcgcttgtccgagcacagtcacagggggaactaaagaagggcctccatgatctttcagcagttgcccgttttttgaatcaaacccggctgtcgctcacgtttcaggcgaagttaacgggggattttgatgcccttcaggatctgatcgatgtcagcctgtctattcttgattgatatattgtttgtcatggggagatgggctgctgcccgtttttatcactattttagactgattggtcaaaaaagaatggaggaaagaaaatgacgcgtgcgataaccgatgtgatggaactgtttttgcagtcgatgcttgaaaaggatatggaaaagtggatacagctttgggatcaagatgcggtgtttgagcatccatacgcaccgccggtttttcctaaaaaaatagaaggtaagtcagcgatttacgattatataaaggattttcccgaaaaaatcgatattgtccgctttacagcgccgactattcatcaaacggcaaaatcgggctattcggctgtcgaatttgaatgtgaaggcattgtgtgtgagacgggtcttccttataaccaacagtacatcagccttgtaaaccttaaagcgggcaaaattgtccactacaaagattattggaatcctttgactgtcgtcaaatcgttcggaggacagctgcaaacctttttataatctgacaaggagtgatgaaagtgggaaaaaaatattgattaccggcggaaccggtacgacagggagccgaatcgccaaaaggctcgtgcatttgggtgccggcgtccggatcgcaagccggagaatacctgcaattaccggagcagaacatgtatattttgactggaatgatcaaacaacttacaaagacgcattaaaaaacacggactcattgtatttggttgcgcctgtcggtgtatacgaaccgtcgccaatcgtactgccttttttggaaatggcatcggcattcggcgtccgccgcattgtcctgctcagcgctgcaattattgatgaaaatggaccggttttcgggaagcttcatcacgcggtcaggcgatatgttcctgaatgggcggtgctaaagccttcatatttcatgcagaattttgaccatcagcatggcgcttcgattcgggagaaaaatgaaatcgtcaccgcatcaggcgacggcaaagtcgggtttatagatgcagacgatatcgctgaagtagctgtgcgcgcattgcttgatcaaaagccgcataatacgagccatattttgaccgggccggaagccttgagttatgccgaagccgcggcaatcatcggcagagcggcaggccgcgacatcagacatgtcaatgtcgaagtgtccgcgttgagaacaaggtatataaaggcaggattatctcccgattatgccggcttcatgtcggaattagatgagaaaatcaagaacggcaaagaaaaccgcatcacggatacagtggaacgcatcacgggaaaaaaaccgcgttcactggctgatttcgctaatgaacacaccggacgctggcgtctgttttaactcgttcctgaagctgaacggtcttttctcttcatttttgaccgttcagtccaattaataaaatgtttcgtttatttcccatgactcaactgtacagtaggccaagtgagggttcattcccatgcccattaaataagccattgccgctacttcttccatggcatggtgataggaagtggcttgggcttcatttaaaccgtaatgaacaaaaggtgctactgtgcacaacgtcttatgtttcaagtggggaaacaacggacatttaatgtggtgcaaggcggtttcgggatgctgatactgggggatatgcgtatgctgttcgggaaccgccgtctgctgtaaatgttctgcattctccatttctttcgtcctttctcgtgcggattttcgttgtattctatgttccgcttatgccctgtgtgttagacagttgtcacggtttgataggcaaataataagacagaaaggtcaaataccggtagacttttaagcaggataaaaaaaggaggtattttttatggctaaacatcatttttaccttcaggcagactggcctggaaaacgaaacgacatcggaaggattgaaagcgggaatttaaaaaccgaaatttcgataccaaaggaaatggacggcccgggggcggggacaaaccctgacgaaatgctgctcggtgccgctgcgacttgctatatcattacacttgcagcgatgatggaaagaagcggattggaaaaagagagcctgacgatggaatccgaggccgttgtcgatgtgacaggcggggtgtttacgtacgaaaaaatcattcacagacctctgatccgcctcccgaaagaagcggcgcaaaaagaggccgaacttgccgaaagactggctaaaaaagcggagacatcatgcatgatatcaagggcggttcagggcaacgtcgccattgaattagagccgaagattgtcgtctccaaagcggattagatttcgatcgtgagctgagccttttgatccgctgcttcggtgcgctttgaattgagcagaaagacgccgccgatgatcaaagtaagcccaataagagttttgagattaaatggctcctgaaatataaaatgcccgattgcagctgtcaaggccgttccggtgccggcccaagtcgcataagccgctgataaaggcagtgtttttaatgaaaagctcagaaatgtaaaagaagccgcaaaaccgattatcacgccggctgcgggcaggggggcgctaaagccttctgacagcttcagcatcgtgcttccgaatacttcggacaaaatggcagccgccaaaaagatcatgcctttcatgacattcgcctccttatgacaaattgatcagtacaacgcctgacacgagacagataatgccggcgatatttcgccggttcagcttttcttgaaaccacaagacgccgatgattgcagtcagaacggtgcccgctccgctccaagtcgcataggagaggcttaatggaatgacctgcaatgtgagcgacatcatgtaaaatgcgagaccgtagccgattactacaagaaccgacggctgccagcgcgcgaacccgtcagatattttcagcatggcggctgccgccgcttctgacaagatggcgatcagaagaaaaatgtagcctgcaatcatacggaatcctcctctatcgattttattgcatgattcaaaaggagagctttctcttcgtcagccagcagttccaattgaaacattcccgaaagccagatgcgccggatacgagtttgacatatgcaaaggccgggggggcaaactccgcagcgccctctgcgcgcgcttgtacaaagttgaacggtagttttcattcgaatatcataaagcgcagcccataaacgattttaaagtgtttcagcttttattccgaaatcgttatgagcttcttcaaagctttccccttttttagacataaaaaaaaccccgcttcactaaccggttggtaaaatccatcttaattgatgcaaaagttctaagtcaagaaaaaagtaatgtaaaaaggcccctgaaagagcctttatctgtcagaaataaggatagtaaggatacggcggatacggatatccccaagggccgagaagcgctccggcagtaaggccgcccaaaaatcctccgaagaaggggcccggaccgaaaaatggacgcgggccgaaaaacggccgcccaaaaggtccgccaaagaaaggcctgccaatgattcgctggctgtcgtcgtcatatacaggagcatggtcgaaatgatacataaaaaaatccctccaataataaaatgatacctgactaacatcactgtattctgcccagccgtttttgcctgggcgcccgccggattttttagtgaagcagccctcaaaaaggagtgaacgaaaacatgacgctgtatcagtcggattggtcaaaagcgcctccccatgcccacgcctacagggcgagaacaacgactgccgagggacattaccacctaattgagggtttttcccagccggcaaacgggagcaatacagatgggcacgttcatttttattccggaattacttctttcgtcgatggtcattaccataggtattatgcgattacggggccagcgattccgcgggcggacggcacgcactatcatgaaatcgagggcacgacctatttggcatattctgcggctcccccggtcagatatggcggagtcgtttatgtaagcgatggaatgaaggaaaggcaccggcatccttttaagggttacacaagagaaatcgtcggaaatgagccgattggctggtgagggaatgtttggaaaacagtgaaaacgggtaaaatgaaatgggtgtttttgaatgtgaaatggtataatgggaggagcttgtttaaagagagtgatcatcagtgaataaaacgaagccgccggtcatcgttttgatcggaccgaccgctgtcggtaaaacaaaattaagcgtcatgctggccgagcgtttgaacgcggaaattatcagcggagactcaatgcagatttacaaaagaatggatatcggcacagcaaaaatcagagaagaggaaatgaacggggttccgcatcatctgatcgatattaaagaaccgacggaatctttctcggtagctgaatatcaggagatcgtcagacaaaaaattgcagagattgacaggcgagggaagcttccgatgattgtcgggggaaccgggctctatatccagtctgtcctttacgactattcattcacagaggaagcaggcgatcctgagttccgggcggagatggaggcgttctctgcgaagaggggggccgaatatgttcacgatcttttgaaagaacgcgatcccgaagcggcaagagccattcatccaaataataaacgaagggtcatcagggcgcttgaaatcctgcatacaacaggaaaaacgatgtccgaacatatggaaggacagcggaaagagcttttatacacgacggctctcatcggtttgacgatggagcgggaagtgctctatgacaggatcaacagccgcgttgaccagatgatggatgaggggctgctggatgaagtgaaactgctttatgatgaaaacgtaagaaactgccagtctgtccaggcgatcggctacaaagagctttatgcgcatctcgaaggcagagcgtccttggaagaggcggttgagacattgaagcggaattcgagacgctacgccaaaaggcagctgacatggtttagaaatcaaatggatgtcgcatggtttgacatgacgccccctgtcaatatcgagcagaaaaaacaggaaattttcacttacatagcaggaaagctcgaactttaatcgaaacaatatggtatagagaaacaaggaggaccagaaacatgaaatcgataaatattcaagatcagtttttgaatcagattcggaaagaaaatacatttgtcacggtctttttactgaatggatttcagctgcgcggacaagtaaaaggatttgacaactttacagtgttgattgaatcggaaggaaagcagcagctcatatacaaacacgccatttctacgtttgcaccgcaaaaaaacgttcagctcgaactggaatagcgattcacggactaaaagaccatgccttgcatggttttttcagattgcctgacaaaatcctgaaacaggttactgttttgggatttttcgttttcaaagcgactttacaatcacctgcggccgttgccggtctttcagaggaaaaaaactttggcaacctgtctaaaacgccgccgtcatcacgtcctgtgaaagtccgaggcattcaaatttacaaagcggcatctagtcgctaaactaagtagtgtttacatcaattcagtttgaaaatgaaaaggaatgagcgaacaatgaaacctaagatcgtcatcaaccattgggaagagacgtgtgaagatgattcctgctatgaatacggcacaagtattctcgtaaacggaaaagagcttgtcagggaagcgtcgatcatgacggctgttcagtcggttcttaaggaactcggcatcgaagccgatattaaagaggtatgcgagaacaagtgctgtgacgcttacaaaaaataagcgaaaaagtctagtctactaactcaatttttttcgtgttatgatagatttcggtttgtgagtaggatgagcgaacggctctcattctactcatatttctttggcctaaggcctcctaagctgaagcgaattgtgaactttcatcaactcgagcacaatatattgtgttttcttgaatgatagtatactatatattgtgtaaggttcgagtggaagactcggaaacaattttactaggtcgtgataatgatgattcagatcgtatttgattcaaaaacgggaaacgttcagcgctttgtggataagacgccttttcgcaataaacggaaagtcagcacagaggagtatctagacgaaccgtttgttttgatcacgtacacgacagggtttggggaagttccgaaaacgactgagatgtttcttgagaaaaacgcccatcttcttttgggagttgcggcaagcggaaacagagtgtggggagacaattttgcgaaaagcgcagaaaaaatctcgaagcagtatcaggttccgattctcggcaaatttgagctcagcgggacggccaaagacgttgaactgtttactcaggaggtagaaagagttgtcacaaaatcaagtgccaaaatggatccagttaaacaatgagatcatgatccaaaaagacgggaaattccagtttgataaagataaagaagctgtacatagttattttgtagactatatcaaccaaaatacggtatttttccatgatctgaaagagaaaatcgattacttaatcaagaatgactactatgaagaagagtttttaagccgctacacgtttgaagaaatcaaagaagtgttcaaagaggcttacgccaaaaaattcagattcccgtcctttatgagcgcttttaagttttacaatgattatgcgctgaagacaaacgacaagaaaaaaattcttgaacgctatgaagacagaatctctatcgtagctttattttttgcaaacggggataaggagaaggcgaaggaattcgtcagaatgatgatcaaccaggagtatcagccgagcacgccgacgttcttaaatgccggccgcaaacgccgcggagagctggtcagctgtttcctcttggaagtcaatgattccttgaacgacatttcgagagcgattgacatttcgatgcagctgtcaaagctcggcggaggcgtatctttaaacctttcaaaactgcgtgcgaaaggcgaagcgatcaaagatgtcgaaaacgcgacaaaaggtgtcgtcggcgtgatgaagcttcttgacaacgcattccgctacgctgaccaaatggggcaaagacaaggctcaggcgctgcgtacttaaacattttccaccgcgacatcaacgatttcctcgatacgaagaagatttcggctgacgaggatgtccgggtgaaaacattgtccatcggggttgtcattccagataaattcatcgagcttgcaagagaggataaagcggcatacgtcttctatccgcacaccgtttataaagcgtacggcgagcacctcgacgaaatggatatgaacgagatgtacgaccggcttgtggaagatccgcgcgtcaaaaaagaaaaaatccacccgcgcaagatgctcgaaaagcttgcgatgttaagatcggaatccgggtatccgtacattatgttccaggacaacgtcaacaacgtgcatgcgaacaatcatatttcaaaagttaaattttccaacctttgctcggaggttctgcaggcttcacaagtttcatcatacacagactacggtcaagaagatgagatcggccttgacatctcctgcaaccttggttcattgaacattttgaacgtcatgaaaaacaaatcgctcgagcagacagttaagcttgcaaccgattcgctgacgcacgtttctgaaacgacaaacattacaaacgcaccggctgtcaaaaaagcgaacaaagcgatgaaatccatcgggctcggagcgatgaacctgcacggattcttggcacagaacaatatcgcctacgaaagtgaggaagcgagggacttcgcgaacactttctttatgatgatgaacttctactcgattgaacgatccgccgaaatcgccaaagaaaaaggtgagacgtaccatgggtacgaaggttcagcttacgcaacgggtgaatacttcgaaaagtatgttacacaagatttctcgcctaaattcgaaaaagtggccaagctttttgaaggcatgcacatcccgacaaaagaagactggaagcagctgaaacagtttgtcaaagaacacggattgtaccacagctaccggctgtgcatcgcaccgaccggatccatttcatatgtacagtcaagcacagcatcggttatgccgatcatggagcggattgaagaaagaacatacggcaactccaagacgtattatccaatgcctggacttgcgccgagcaactggttctactataaggaagcgtatgatatggacatgttcagggttgtcgacatgatctcgacgattcagcagcacgttgaccaaggcataagctttacattgttcctgaaagatacaatgacgacacgcgatttgaaccggatcgatctttatgcccaccataaaggaatcaaaacactttactatgcaagaacgaaggatacagggcaagaaggctgcctttcttgtgtcgtttgattaaaggagagtatgcgaaagtgacgaaaatttacgatgcagcaaactggtcaaagcatgaagatgattttacccaaatgttttacaaccaaaatgtaaagcagttttggcttccggaagagattgcgcttaatggagatcttctgacatggaagtacttgggtaaaaatgaacaggacacatacatgaaggtgctcgcggggctgacgcttctcgatacagagcaggggaacacgggaatgccccttgttgctgagcatgtggaagggcatcagcgcaaagcggtgctgaatttcatggcgatgatggaaaacgcggtccacgccaagtcctattcaaacattttcatgacgctggccccgacagagacgatcaacgaagtctttgaatgggtcaaacaaaacaaatacctgcagaaaaaagctcagatcattgtcgggctctatgaaaaaatccgccagggcgataaaatctcgctgtttaaagcgatggtcgcatccgtttatttagaaagcttcctgttctacagcggcttctactacccgctttatttttacggacagggcaagctgatgcaaagcggcgaaatcatcaacctgatcttgcgtgatgaagcgattcacggcgtctatgtcggcctgctcgctcaggagatttacaatcagcagacgccggagaaaaaagaagagctgtatgcattttccattgatctattgaaagagctttatgaaaatgagcttgaatatacagaagacctgtacgatcaagtcggcctttcacacgacgtgaagaagttcatccgctacaatgccaacaaagcgctgatgaaccttggctttgaagcttattttgaagaagaagagatcaatccgatcgtgttgaacgggttgaatacgaaaacgaagtcacacgacttcttctcaatgaaagggaacggctacaaaaaagcaacagttgaaccgttaaaagacgacgacttttactttgacgataagtaagccgggctaaaagggcgcgccagcgcccaagccctgcccttcagctattgatacacggcaaaatgagagcagaacgaatctgctcttttcactttgaggaggaaacggatacaatgggaaaaatggacgaaatgattctcgtggtcccgcgggaaaacgtatttgcaaatgaaacgctgaccttccaaggcgtcaacagcgacggtgagacgatcgggaagatcatggcgcatattgaacgccacttcagtgaaatgagaaggggagacgccgaggaagatcctgcatttaaacagccgatcccttatgttgtcatcaaaagagaagacgaaatatttgtatatgagcggctcgaaggcggaggggaagcgcggcttcacaacaagctgtcactcggcttcggcggacacatgaactttgccgaagggcttgactttcccgatattctgaagttgaatacagaccgcgaacttgatgaagagcttctaatcgaggaatcagctaaagaaaaaatggtgacgctcggactgattaatgatgatgaaaacagcgtcgggaaagtacatatcggaatcctttcagcgcttgaattaaaaccgggcgcacacgttgaagtcaaagaaaaggagcagattgccggccgttggatgaaagccagtgatctgaaagaaaaaagcgtctatgacagacttgaatcttggtcacagtttgtcgttgatatcttagtttaaattggaaaactcgctgatcagcgagttttcttttcgtatagaaccggtttccattgaaaaaatgagccatgcttttcgatcagcccgaagccgggatatgggaaatgacagccgtggagcaggaactgtccgttataagcctgtcgggccagcagtctccttgtcttttctccctcgataggatcatgctcaagcgaaacccgcagcttcggattggagatactttccggaatatgaaatacatcattgatgatctgacagacgccgtcttttgtatgcaattcaatggtcaggtgtccaggcgtatgtccgggcgtatggatcagcttcagtccgggaagcagttcggtgtcttctgtcagcagcttcagaagcggccggacagcggagagaatgtgaaactgaggagacgccggcgtttgttttgcgtacagccattctgcttcactgagcagatgaacagcgtttggaaaagcgggctctccgttttttagaagacctcccgtgtgatctaaatgactgtgtgacaaaatgacatagtctatcgagtcaggcttgattcccgcctgcttcaggtgatgaagcaagtgcccgctttcttgtccgcctgtttccccaaatcccgtatcaatcagtatccgtttgccgttcgtctccagacaggcaaagttcagcgctgcttcaaattcttcaggataacgttctgtttccttggagtctcctcccgccaaaaaaaaatcccttgaaacccgaaatgctccatcagataaaattgtcatttgaaaagactcgagctgcatgcggtatggctccttcatgataaatccttcccccttgtgtttgaccgagctgcctttgaaaaggcagcttcattgtgtcttttcatttgcgatgagatttttgatcggttattattaaatcgtaattattatgatttaatagcggaagtataactgaatccgtttattctttcaatcaaaatatactgtttaaaaggaaaggagcatgattttatgccgacactggaagagctgtatcggtccgtcattatggatcatgcaagatacaggcgaaattttcgaaaaatcgataaacacggcgtgtattacgtccattacaaaaatccaacatgcggtgatgtgatgactttgtttatcgacattaaaaatgaaaagatcgaagacgcagcttttatcggagatgggtgcagcatcagcatggcttcctcatcaatcatgactgaactgataaaaggaaagacgttaaaagaagccgggttaatgcgtgaagcgatggaaaatatgatcagaaaaggagaagagccggaagaggatctgctgggagatgccgtttccctgattggcgtccatccgttgcgggcccgtcataactgtgccctgatgccttggcaggcgctcgatcggatcaaagagaacgtttattaaatgaacatcacatctaaagcactccggttctaaagccaccggcaaagaatatcggaagattcaagggaaaaaaggggcagtaacgaaagaggtatggaaaacgaaacgaatgtaaagcaggaagcaatggcgcagcttaaacggaaaggcattcgaatgacaccgcagcggctggctatctaccattattttctagccaacaggaaccaccccacaatagctgaaattcaacaatcattgagggagatatatcctgccgtcagtacagcgacgatatacaacaccatccgctattttaaacaagagggccttataaaagaaatggggtttaccgatccgcttcgttttgatttggctctagaggaacatgatcatgtcatatgcgaagtatgcgggaagatcgtcgattttcattgtccgcaactagagaaagtaaaagacattgcggcacggctgaccggatttaaagtgacacatcaccgattggaactgtacggcatctgcaacgattgccaggcgaaaagaaaatacgccgctaaagagaaaggggttagataaaaaatttgcttgtgcgaaaaaccaaaaaccgatatattggttttatgatgaagaataacattaaacgaatcaaacgaatttcgcttcgggaagaagtgtatcaaacgctgaagcgcgccatcgtacatttggagctaaagccggaggagcgcctgcatgaccaggagcttgcagagcagtttggcatcagccgcacacctgtcagggaggcgctcaaacgactggaagatgaaggccttgttgaagctgtcccgggatcggcaacacgtgtagcaccgttaaatcgcgaggaggctgaacacgcttttacagtcactgcggcgctgcatgcgctggctgtcagactgtcgcttccttttttaacggattccgactttgatcagctggaggcgcataacaaaacgttgcagcaagcgattcaaaaagaagacattatcgaagcaatcgaatcagatgctgcttttcatgacgtgtttttacaagcatcaaaaaacccggaaataacccgggcattggaaaggatttcttcaaaaatttaccgccttgaaatgtcgcagttttcctcgatcggcagcttgaaatctgttgaacagcatcagaacatcatcgatgcctgcagacagggggatcggaatgcggccatcaagcttgccgaggaaaactggctcagtctcggagatcgattggccggacatcaggaaaaggagtgaagggattgtgaggccgattatactgggcgtttttgcagccttcttttttgcttttacattcgttttaaacagggcgatggagcttgaagggggaagctggatctggagcgcttcgctgagatttatcttcatggcgcctcttttatttgccatcgtttggcttagggggaatgtgaaagagctttttcaggaaattaaaaaagcgccgggcatttgggtgagatggagcatcatcggcttcggtctcttttatgcgccgctctgttttgcggcggcttacggaccgggctggctgatcgcgggaacatggcaaatcacgatcatttccggttccctcttggcgccgcttttttatgaaaccgttcaaacaaaaacaggtcccgtacagataagaggcaaaattccttataaggggctcacgatgtcgttcatcattttaatcggggtggcgctgatgcaagctgagcacgcggcacagctttctttgcacgagatgctgctgtgcatcgcgccggttatattggcttcatttgcttatccgcttgggaacagaaaaatgatggaagtttgcgccgggcgcctcgatgcttatcagcgggtattggggatgacgctggcaagccttccgttttggctgatcctctcgctgtacgggctggcatcggcaggtgcgcccagccggggacaagtcattcagtcaggattggtggctgtattttccggaatatgcgcgactgtgctgttctttgccgcaacagatcttgtaaaaggggatatgcgcaaattagcggctgttgaggccacacaatcgtttgaagtgctgtttgcggccgctggtgaaattttaatcctatcgagtccgcttcccggtgccatctcatggagcggaatggctcttgtgattatcggaatggtgttgaacagccatgcatcgaatcaaaagccggcggttcaaagtaaagctgcaaaagcataaaaaaagcctgcgatctatacgagaagatgtgtgccgggttttttgtctaaagaaatgaaagataaaaaaacagccctgttttaaacagagctgttttttgcaaaggtcagctgacgttctttaatttgtcctccggcaaagcgataaaaaatgtcacaatgtaaccgatcactgcgccgataacagccggaacgacccagccgacacccatgctgaacagcgggatgttcgcttttaagatatcgttaaccggccccagcgggattttcgccgcgtttaatccgtcgatgatgctcagaattcctgtcgggataagggcgccgatatagacctcgcgccgttcattaaacagcttatcaatgaatgagagcaaaacgacgacgatcgcaagcggataaatcgcagacagaatcggtactgaaaacgagatgatttctgtcagtccgaaattggcaatcacaaggctgaaaagcgtcacaatgatgacaactgctttgtaagagagcttcggaatcagatttgaaaaatactctccgcaagaagaaacaagtcctacgcttgtcgtcaggcaggcgaacaagatcgcgatgccgagcacggcatttccaagcgagccgaacaaatatgcggaagctttggacaatatttcgccgccgttgtcgagcgaaccgacggtttcaacgcttgtcgcccctaaataagcgagtgaaacgtaaacgagtccgagaccgactgcagcgactatccccgctttgatgcatgaagcggcgattgactttggatttgtgactccgcggtctttaattgccgtaatgacgacaattccaaaaacaattgaagcgatcgcatccatcgttttatacccttctaaaaatccgacaaacagcggtgcggattggtaagcctctgtcacagacccgatgctgcccatcggggtgataaacgctttgatgactaagattgcgattacagtcaataatatcggtgttaaaattttaccgatgcggtcaacaagcttgcttgggtttaacgccaagaaataagtgatcccgaaaaagatcagggtaaagatgaacagataaagacttgacgaatgttttcctaaaaacggctcaaccgctatgacgtatgaaacgtttcccgtcctcggaatggcaaataaaggtccgatcgttaaataaatgctgacgattaatatcgtgccgaagaccgggtgggctttgtcagctaggccttttgcactcccttttaaagcaaccgcgatgacgccgagcagaggaagaccaacgcccgtcagcaagaatccgatgatagccggccaaatattctctccggcagcttgaccaagctggggaggaaaaatcatatttcccgctccgaaaaagagggcgaacagcataagcccaatcgccgtcgtttccttagcggatagtgaagttttcattaaaaagaacctcctggcattttgtttaaattttctgtcaatttattttcgtgatataatatgacaaaagtccaaagactattatattttaaaaatcagagaagtcaaacatttatttttaattttcaattacaagttgatatgataacatatacagtcatgaaaaagaacgttcattttaaaggagtagatcatgatttatcttgataatagttcaacaacaaaaccatatcctgaattattacaaatttatgaacaagtaaatcagcgcttcttcggcaacccgtcgtctctgcaccgccacggcgttgaagcggatcaattgctttctgaagcgcggaaacagattaaatcggcgctttcgctaaaaaatcatgatatcgtgtttacgtccggcgcttcagaagccaataacatggcgcttaaaggcattgctttggcacatgcgcaaaaaggaaagcatatcattgcttcctccattgaacacccgtctgtgacggaatccttggagcagctgaagacggccttcggctttgaggttacatatcttcctgtcgacggccatggctttgtttctcttgaagacttgaaacaagcgctccgcaaagacacgattcttgtaagcatcatgcacgtcaacaatgaaacaggcgtcatccagcctctggaagaaatcgggaaaatcgtaaaagaaaacacaagggcatactttcacgttgatcatgttcagggcatcaacaaggttccgctggacatctccggggcagccattgacctttgtacaatctcgggtcacaaatttcacggcttaaagggaacaggagccctcattctaaacgaacggatctcgctttttcctttgatttccggaggagaacagcagaacaacaggcgtgctggaactgaaaataccgccggcgccgttacacttgcaaaagcgatcaatttgtcaaaacaggattataaccattatatagaagaaataaaggcggcaaaatcagcttttatcaaggagctaaaagagctgaaaggtgttatattaaatacgccggaagaaaacagcgcgccgcatatcatcaatttttccgttccgggattgaaggctgaggtccttttgcatatgctagaggagcgggatattttcgtatcgacgacatcagcatgctcttcaaaacagcataagccgagcaaggtgcttttagaaatgggaaaaggtgaaggtgcggcctcaagcagcatcagaatcagcatgacgtaccgggataatcatgagattgtcggcccgtttatgacggccttaaaagaaagtttacacaaactaaaaggaattatgaggtagaggcacaatgaatgaggactacattttaatcagatttggcgaaatttcaacaaaaggaaagaatagaaagctttttgtcgatcgcctgaaaagaaatatcaaaatggtcttgcgcgatttccgcaacgtccgttatgaatcaacacgcgacagaatgactctcgtattaaacggagaagacgctgaagctgtaatggctcgtctgaaacacgttttcggcatccaatcgttcagtcttgccgtgaagtgccggacagatctggaaagcattaaagagacggcactcgcttctgttcaagaacaatacaagcccggggatacctttaaagtatcgacgaaaagggcttataagcagtttgaattaaatacaaatgagatgaatgccgagatcggaggacacattttgcgcaacaccgacgatcttaccgttgacgtccactccccggacatccatttgcgtatcgaaattcgggaagatgccacgtatttgacattccgggatgaaaaaggtgcgggcggactgccggtcggaagcggaggaaaagcgatgcttatgatatccggcggaatcgacagccctgttgccgggttctatgccatgaagcgcggacttgagatcgaagccgttcactttttcagcccgccatatacaagcgagcgggccaagcaaaaagtgatcgatcttactaagcggcttacggcttttggcggagacatcaagcttcatatcgttccgtttacaaaaactcaagagctcattcaaaagcagattcccgagaactattccatgacggcgaccagaaggctgatgctccagatcgccgacaaactgcgcgaacgccataacgcgcttgcgatctttacaggggaaagcctcggccaggtggcaagccagacgcttgaaagcatgtatgccatcaacgcggtcacgagcacgccggttttgcgccctttaatcggcatggataagacggaaatcatcgaaaaagcgaaggaaatcgatacgtacgatatcagcatacgtccgtacgaagactgctgcacgatctttacgccttctgcgccgaaaacgcgtccgaaaaaagagaaaatcgaacactttgaaagctacacagatttcgaaccgcttatcaacgaagctgtggaaaacacggaaacgattgttttgagcagcaaagcggaaacgaaagatcaatttgcggattttttctaaaggaatattcaatcaaacatctttgtctgtttttgcatacaattaccaaacattctttgtatgaagtcatgtgtttttacacaatctatactcacaaggaggtgagaacacatggctcaaaacaacagacaaagcagttctaaccaactattggttcctggtgctgctcaagctatcgaccaaatgaaattcgaaatcgcttctgaatttggcgttaaccttggagcagaaactacttctcgtgcaaacggttcagttggaggagaaatcactaagcgtttagtttctttcgctcaacagcaaatgggtggaacacaacaataattaaaattaaaaagcaatggataatgggtggggtttaatccccactcttttttatgttctgcaaaataggcatttcggaatacaattgtatgaaaggattatgtataataaaaagatggcacaagacaaggagatggaagggttgagaagagaagatttgattgcgccggagaagtataatgcggttgatgaaattgaaaaatttaaatcttcccgcgataagaccgcattgatctgggaagatgaatcagggcgtcaagtgtcatggtcctatgaaaaattgattgaaaaggcttacaaaatcggcagcatattgacccgttctggactgaaaaaaggtgacaagcttatcgtgatgatgccgcggataccggaaacgtatgccgtgtacatggccattttaaaagctggaatggtggtcatcccatgttccgaaatgcttcgggcgaaagacttggattacaggatcaagcatgcaggcgtcaaaggagcagtcgtatattcagcatttcttgatgcttttctagatgttcgttcaaaagaggcactgtcgttatttgccgtcggagaaagcagcgaagggtggatcaatctgctcgaaaaaatgaatcaggccattgcaacggattttcaagcggcggatacctctcgcgatgacatcgcatttttatcttacacatccggcacgaccggtcagccaaaaggggttgtacatacacacggctgggcttatgctcacttaagaacgacagcttccgcatggcttgacatttcggaaggggatctcgtctgggcgacagcagggccgggctggcaaaaatgggtatggagcccgtttttagcagtgctcggtagcggtgcaaccggctttatctatcatggaaaattcacgccggaaacgtatttgcggctgattgagcgccatcaagtcaatgtgctgtgctgtacgccgacagagtaccggttcatggcgaaagtcaatgatttgtcccgatttgacctgtcttctctgcacagcgctgtttcggccggagagccgttgaacagggaagtcatcgatacatttaaaaagcattttcatattgctgtgcgggacggatacggacaaacggagagcacgctgttggtggggattttaaaaggtatgaaaatcaagcctggaagcatgggaaaaccgacgcctggaaacttggttgatattattgacgggaatggaaagagctgtcccccgggcgaaacaggcgatattgccgttcacttaagcacgccggctctttttaaagaatattacaaagatcaagaacgaacgctccgacaaagaagaggggattactttataacaggggataaggcgcgaaaggatgaagacggctatttttggtttgaaagccgcaatgacgatgtgatcatcagctcaggatatacaatcggcccgtttgaagttgaagatgcgctgatcaagcatcctgaggtcaaagaatgtgctgttgtggcaagccctgatgaaatcaggggatcgatcgtgaaagcatacgttgtcttaaaggacccatcccgcggaaatgaacacctgacaaaggaattacaagaccatgtaaaagccatgacggccccttataaatacccccgggagatagaattcatcgaagaactgccgaaaacgccttcggcgaaaatcaagcgctttgaactaagacaacgggaaatcgcacttaaaacgaaagctgaataaccacacaaagaggagggaatatccgttgggtcatgactcactccgaaacatagagaaagaaatcgcgcttttggtccgtctgacgacggcctacagcccgcgctttggaagtctggaccgctcggaatatctgctgttaagcgagcttgataagcaaagtcctctcgccatcaactcgctggctgaaaccttaatgctgaatctgtcgacagcaagcagacaagtttcagccttggaacggaaaaagctcatcagacgttttcctgatcccaacaacggccggatcagccttgtggagatgacttcggagggcattgatgctctgaaaaaagtgcaaaaggcccgctatcatgtatacacggaggttcttcaagactggacaacagaagaactgaacacgttggaaacccatttgatcagactgaatcaggattttaaaaagtggagcaaataagcggctaaaggctggttggtcagacgatcatcagccttttctttttctttcggttgatttattgcgggaaggatgtataatttaacttgcataatacaacttgtaatatgaaatatataactaaaggaggagcgcttatgagtcaatctgatgtggcgatcccgagctctaaaaaaatcggcattccgaagtatttgatcatttcggttttaacgatactggccattgggccgcaatattttcttaatctttcctatacgctcagtcaagtcgtcattcaaaacggacttcatttgtcaccggacgatatgcggattccgtccattttgacaaatcttgcttttgctctcggtgttccgcttggacgtatattttcaaggaggttcggcattcggaacagctacctgacactcatcaccttatttttatgcggctcgctgatcgacgcattttcagcaggcttgttttcgcttcttatcggaagggtgatacaaggattatgctccggaatgttatttttgacgattcttcctgtcaaattgatttcgtttccgaacaaggtccgcaatttgtttttgtttttcgtcattagcggattgttcggcgcttctgccatcggagcggtttttggttccctgtcactcagcgcggatgcatggcgctgggtgtttatattaaatatttgttcgcctgtcctttgccttgtgatcggcttcttttctttgccgaaacaagcagcggatgagcgggagcatcattcgattgataagacgggcgtttttatgctctcattgctcatggttgttttgacggtgccgcttatcaatttgcagaagacgggtgttcattctttttatgtgtggccgttctttttggccggattcatcattttggcgttgtttgtcattacagacttgcgcgcccgggaacctcttgtgccgtttcgttcactgtggtccgcaaaagctgtttccgggacagtcatggccgttgcttcacacattgcaatcattgtttcccttgccgggataaacggatttttggaaaacattgcagaggcttcttttgaaagcatgacacgcttttatttgtgttttttcgcagggattttagctactgccgtgctcagcacgcttttgtatgatcattttggcgccggattgctcggctgtatcggcgctttggaaatgatatcgtcggtatggaatggagatcggttcaacccggtgtttcgatggagtcgttatatcttcatgctgttttgctgggcagcggcgtcagcatggtattggtatcgggagcgctgggcacggcgcttgccggagatattcaccaagcttcaaaacgctcggtttcgcttcactttatccgcaatttcgccggtgcctgggctgcaccggtgatcggctggtttgcttcaatgaagaatgcggtgcactacgagatgataagaggacatatcagtgaagctgatcctgaaattcagctggaattgtcaaaaatgattcgtgattttgtcagcagcgggctttctgttggtgatgcgaagaacatggcggcctatacgattgttgcaaatgccagaaaagcttcagcccttggcgcatatcacgatttgtttacgatactgctctggctaagcatcatcatgcttgcggcttcaattggaaaggcagcgaccggaaaaggaagatcgctcgttcagaagcgccttcgcctgccagacccttcagcaagtcaacaaaaggagataggataaacatgagtaaaggacgtttgatgatcatcaatatgattggtattatcgcaactttagcgcttgtcgctgtatgcggatattactattatcaaaataaacattatgtcacgacggatgaagcaagggtttccgcaaatatgacaaaaataacggcgcctgcttccggaaaattaagcggctgggatgcaaaagaaggcgaccatatatcagacggcgacaacctcggaaaaatatcggacgggcagcagtcggtagctgtcaaagccatttccgacggaacactggtcaaaaatacagccgtcaatcataaaatcgtaaatgcgggggttgtcatcggtcaaactgccgatatggataacatatatattacggctcatattaaagaaacggaattacgcgatatcgaaaaagacgacaaagtggacatcaaagtcgacggggaccctgatacaacgaagggaaggtcgaagagatcggatatgcgacagattcggtattttcaatgtttccggaaatgaaccaaagcggagactatacgaaagtcaccgagaaagttcaagtcaagatttcgattcaaaatccgtccgccaaattgcttcccggcatgaatgcggaagtgaaaatttcgttataggcattcgcaaaaaagagcaagacgatcgtcttgctcttttttaatgaaaaggttttcaaaattatagaaatgtgcgccttactttttcccagaacgaattatcttttaatttaatggttttgatcatcttgccggagaggctgacttcgacttctttcacattcatcgtactgaaggcttcgttatcaaggccgatgatcggatagtcgttcccgtcctggacgatttttaatgtcagctttcgatccgcgcttaaaataaacggcgagccgagggttctgtatgtgttgttgttcaatgaagcgagctctgtcacctgtatgcatggaatcagcggatcaacgattgccccatcaaccgatttgttataagcggtgcttccggtcggagcggacacgatcattccgtccccccggaatgtttcaaaatgaagatcatctatatagacgtccattacaaatgttttaataatgcttgaacggatggatacttcatttagacattgaaagctggtcccgtcaacggttacatcgatcagaggatattttctgacctcgatttgctccgagtttgtcgcttcaatcattttatcggtatcatatatattaaaatccgcatacaaatgagctttcccctttttggccacgcctacgtacaggcagtcatccctgaagttcgtctttcgaacagcctgcaaaaatgtcccgtcgccgccgatgcttgcgataatattggcttcattgtgatggtgaacgacgcgaaatccgtgttcttcggcaagcggtttcagttttttgcactgctcgtcggtttcttcgctttttttgtaaaagaaataaatgtttcggcggtctgtcacaatcattctcccctttgtctgttaagtttagatttttctgccatctaacatatatgttaaaatgacctgtgacccttagtttaccatgtccaaaaacttcttgtatatgaagcggcatcataatgaactttttctcttcatatacgtactaagacatgcagcttttttattcaaaggaggagaacagacaaaatgaatgcgaaaagatggatcgcacttgtcatcgcgctgggcgtttttgcgttatctgcggtgatgagccttttgcttgcagtatttgacacgatggggaatgacggaaagatgcagtttggcctcaatgacacccaggaagaaacggtgcttgaacaaggaaacagctcaagaaaaatcgccgttcttgaagtgaacggaacgatttccgacaatggcggcgcttcaggcctgttcagctctgaaggctacaaccacagatcgtttttgcaaatgcttgaaaaagcaaaagacgattctgccgtaaagggcattgttctgcgcgtcaattctccgggtggcggagtatacgagagcgctgagatacataagaagcttgaagagatcaaaaaagatacgaaaaaaccgatttacgtatcaatgggatcgatggctgcgtccggcggctattacatttcaacgcctgccgacaaaatctttgcagcgcctgacacgctgacgggttcactcggggtcatcatggaaagccttaactacagcaagcttgcagagaagcttggattaaaaacggagacgattaaaagcggtgagtttaaagatatcatgtcaccgacgcgcgatatgacgaaaaaagaaagagaaatcatgcagtcaatggtagatgacgcgtacgaagggtttgtagatgttattgccgaagggcgcggcatgtccgaaaatgacgtgaaaaaaattgccgacggacgtgtctatgacggccgccaggcgaaacagaaccatctcattgatgagctcggctattatgaagatgcggtcaaagcgatgaaaaaggaccacaaaaaccttgccggcgcatctgttgtcagctatgaagaatcagccggccttgcctcgctgttttcaatgactgcaaataagatgtttaaaagcgaagctgatttcttaaacattaaagaagcgatttctcaatccggtgcaccgagactcatgtatttatatgccaaataggaggggaccgaaaaaatggatgtgacttatgatggaaaggatcataatgaattatcgccgaatgtcggcgtttccagggaagaatcggccccgcatgtagagcatgcctatgccggtttttggatcaggctgtttgcttttctgcttgacggggttgttatcggcagcatcaacaacttagcggtttcacccgttttcagcctgctgaacctccctaaagaatcagggtttttcaccttttcgctttattcttttgtgacggcggcagtattttttgcttactttgtcctgatgacgaagtatttcggacagacgttgggcaagatggtattcgggctgaaggtcgtgtcgcttgtcccggaaaaagggctgacatgggatgtggtcctgtttagggagtttatcggccgctatatcaacagtttatatattacgtatctcgtagcagcgttttcgcctaagaaacaagggattcacgatttctttgcggacactgcggttatccatgaaaaactgtatcgaaaaaaagactgagagttttaaacccggctgaagactgccgggtttttttattcctttgtatcggcggaattccggctatgtttatttttccagttttcttcctataatgcttagtataagaggaagtgaaatcatgatttacatatggattgcgggagtattcattcttttggcagcattgatgataatgaaaatccgcgtagcgatcgagtatcttcatacagacgatgacgaccggctgaccgtcaaagttcggacggcttttggcattctgcgcattaaaagggagattccggtgattaaaatcaaccaggaggatatgaccgttgatgtgaaagaacagacgaattcggctctgaaaaaagataaaaagaggagaaaaatcggctatcgggaagtgttcgatagtacgaagcaaatcaaaaaattggtggaacagatcatcaatatgcagccgatcatccgccggtttatgaagcggattcacgtcacgaagctcgaatggacctctgtcctcggctttcctgacgcggctttaaccgggattgtcacaggcggcgcctggtccctgaaagccggcacggtggctctcttgcatcagcttttttgctttgacagccagccggaatacgaggtgattccagcctttaacagccgttcctccaaaacgcatctgacatgtatattccattttcgggttggacatgctataaccgcagctttcagaatcgtggtgaactggaaagggaaaatgcgcggcttatttaagctgccaaaaaatctgtcaggttcaacaaagaatgattcatcagtataggaggaatagaatatggctgaacatccaattcaaggtttgatgaaaaccgcaatggaaaacttaaaagaaatgattgatgtcaataccattatcggagatcctgtggaaacacctgacggcagcgtcatcctaaccgtctccagagtgggattcggctttgcggctggcggaagcgagttcggcggcaataaaccggccgaatccaaagcgagcgatggagaccgcgaacgaaaagaatcgaagctcccgtttggcgggggaagcggaggaggcgtatcgattacgccgattgcttttttgattgtcggatcatcaggcgttaaagtactgcatttggatgaaaacacgcacgtcatcgataagattttagactcagctccgcaaacgatcgaacggattcagcatatgtttaagaaaaacgataagcagaagcaaaatatgaaccgtcaaaaccagacgcctcctttttaaaagccccggctttccggcaacagagtcccagaagttaactgttcctgcagcagttaactttttttgtctctgccggacttaagctttgcagtttgtcctaaactcttttatagtagagtcatacataaatgaaggaggaatgatgatggcttcaattacatttaagggaaacccggtgacactggtgggttcagaagtgaaagtcggagaccaggcgcctgatttcacggttttgtccaattcgcttgaggaagtcacacttcaggacatcaaaggcaaaccggcggttatttcggtgattccgtctatcgatacaggtgtttgtgacgcacagacccgccgctttaacgaagaagccgcaggcctcggttcggtgaaagtgtatacgatcagcgctgacctgccgtttgcacaggcgcgctggtgcggagcaaacggaattgaaaatgtggaaacattgtcagatcacagggagatgtcttttggggaagcattcggggtttacattaaagaattgagattgcttgcccgcgccgtatttgttttagatgaaaacggaaaagttgtctacactgaatacgtcagcgaagcgacaaaccatccggactacgacaaagccatcgaagctgccaaatcactcgttaagtaaattcaactcataaaagggctccaggtgttcatcttgccggagctcttttcatggctttgattttttgataaggagagacatcatcatgcaaaactatccagtcgaaacgatttatgaatggcttgacaaaggagcggaagtcatcgcacgcgatcggcagatcccttacatagaaggattggcggaagccggagaggcattctttacaggttctgcggaccgcgggctttccgaagaagccgaacaaaaggtgaaggatctgatcggccgtgcgcgcttttcagagtgcagtcatgagtcgatacggaaagccttccagcttgccatactgaaaggccagaaagatattcctcatccgaacaggcagatgacgcccgatacgatcggattatttatcggatatcttgtgaacaaatttatggagcggaaaaaaggattgacgctgtttgatccggcggtcggcactggaaacctgctgcttgccgttttgaaccagctggctgaggaagcgggaaaagcgttcggctcagagattgatgacgtcctgatcaagctggcctatgtccaggcaaacctgcaggaaaaggaaatcgagctttttaaccaggacagcctgcagccgatttttatggaacatgccgatgcggtcatctgcgatcttcctgtcggatattatcctgatgacgaaagtgcgcgcgctttcgaattaaaggcagatgaaggccactctttttcacaccatttgtttattgaacaaagcttgacctatacgaaaccgggcggctatttattttttatgattccgaaccatttgtttgaaagcggtcaaagcgaaaagctgcgtacctttttaaagaacaatgcgcatattaatgcagtgcttcagcttccgctgtccattttcaaagatgaagcacacgcgaagagcattttggttttacaaaagcatggggaacaggcgaaagcgcctaaacaggttctgctcgcgcaagtcccgtcattcgccaatcaggatgcgatgctgaacatgacagccaaactcgacagctggttccaggctgaaaaaagataagcagatcagagaagatatattctctgatctatttttatattcagaaaataataatttcttagtgaaagcgttaacatgtcggatcgtgacttgaaatgcactcttttgagtgtttaaatgagaaaggcagatattttttgaatttactaagaacgattttatacatattttttatgttccgggttgaacataatgtcaccggactataggtaaaaaggagcgtcattttatgtccaaaattattgcaatcaatgctggaagctcatcactgaaatttcaactgttcgaaatgcccagcgaaaaagtattaacaaaaggccttgttgagcgaatcgggctggataacggcatcttcacgatttccgtcaacgacgaaaaaaagactgaaacaacagatattccggatcattccgtagctgtaaaaatgctgctggataaactgacaaaattcggcattatcaaggatttaaatgaaatcgacggaatcggtcaccgcgtcgtacacggcggcgaaaagttcagcgactccgttttattgacggatgaaatgatccatgagatcgaagagatttcagagcttgcaccgcttcataacccggccaatattgtcggaattaaagcgtttaaagaagttcttccgaatgttcctgccgtggccgtttttgatacggcattccatcaaacgatgccggaacaatcttatctgtacagtctgccatatgaatattatgagaaattcggcatccgtaaatacggtttccatggtacatctcataaatatgtgactgaacgcgcggcagagctgcttggccgtccgattgaagaacttcgcctgatttcctgccaccttggaaacggagcgagcatcgcagctgttgaaggcggcaaatcaatcgatacatcaatgggcttcacaccgcttgcaggtgtagcgatgggtacgcgttcaggtaacatcgatcctgcgcttatcccgttcattatggaaaaaacgggtcaaacagccgacgaagtcctgaacacgctcaataagaagagcggtcttttgggtatttctggattctcaagcgatttgcgcgatatcgttgaagcaactaaagaaggcaatgaacgtgcggaaacagcactcgaagtattcgcaagcagaattcataaatacatcggttcttatgcagcgcgaatgagcggagtagacgcgattattttcactgccggcatcggggaaaacagcgttgaagtcagagagcgcgttcttcatggtttggaattcatgggcgtctattgggaccctgccttgaataacgtccgcggaaaagaagcgtttatcagctacccgcattcgcctgtaaaagtcatcgtcattccgacgaatgaagaagtaatgattgcaagagacgtcgtcagactggcacactaaaaataaaaaaacagccttctcttttcaaggagggctgtttttttatacattttcccctttataatgaaaaaagactgtataaaggaggctgtatggccatgagtgttgaagagcataaaaaagaagcgccggactgcgtcaactgcaaagtcattaccgtcagcgatacaagaacggaagacacggataaaagcggccggctcatgaaagagtttttagcggaagccggtcatgagatcgtttcctatgagattgtaaaggacgaaaaggaaataattcaaaaagctgtgctgaaaggctgtctcgacgaccggatcgatgccgtcctattaaacggagggactggcattgcctcaagagatgtaacaatcgagtcgatcgttcctcttttttcgaaagaaattccggggttcggggagatattccgcatgctgagttatacagaggatatcggagcggctgcgatcctctcaagggctgcagcaggtgttattcaaaacaaagccgtatttgcaacaccgggttcaagcggtgccgtaaagcttgcaatgtcaaagctgattgtgcctgagcttgcccatgtcatcagagaactgagaaaagatatgaaaaagtaaggccggaaagccttccggccgaacgctgaatatgcactgaacttcattcataaaaaatgaatgaagttttttttataaaaaggttgaaaaaacaagacttccttgttaaagtgtatacatattaaatgtatttttattaaataaaacttatttttatacaaaagagcaccgagatgagaggagtttttcgaaatgacgcaaaagaaaaaagtggtattagcatattcaggaggacttgatacttctgtcgcgataaagtggcttcaggaacagggatatgatgtagtggcctgctgccttgacgtcggagagggaaaggatctcgcctttgttcagcaaaaagcgcttcaagtcggagcctctaattcttatgttatcgatgcaaaagaagaatttgcgaaagagtttgcgctgaccgccctccaggcccacacgctttatgaaggaaagtatccgctcgtatcagccctgtccagaccgctgatcgccaaaaagctcgtcgaagtggctgagaaagaaaacgcgcaagccgtggctcacggctgcacaggcaaagggaatgaccaagtgcgcttcgaggtgtcgattaaatcgctcaatccggatttggaggtgctggcacctgtgcgcgaatggaaatggtctcgcgacgaagagatcgcgtatgcagaaaagcatggcattccaattccgatcaatcttgacagcccgtattcaatcgaccagaacctgtggggcagaagcaatgaatgcggagtcctagaagatccttgggccgcgcctcctgaaggagcgtatgatttgacgaagcctcttgaaaaaacaccggatactcctgatgtgatcgaaatcgcttttgaagaaggcgttcccgtatccattgacgggactcactacccgctgtcagacttgattttaaagctgaatgaactggcgggcgcacatggagtggggcgcatcgaccatgttgaaaaccgccttgtcggcatcaaatcgcgcgaagtttacgaatgcccgggcgcgatgactttgattaaggcgcacaaggagcttgaagatttgacattggtaaaagaagtggcgcatttcaaacctataatcgaacaaaaaatggctgaagtgatctataacggcctctggttttctccgcttaaagacgcgctttccggtttcctgaaagaaacgcagaagcatgtcacgggcgtcgtccgcgtcaagctgtttaaaggccatgcgatcgttgaagggcgtaagtccgaatactccctgtatgatgaaaagcttgcgacgtatacaaaagacgatgcattcgatcatcacgctgcagtcggctttatcgagctgtggggactgccgacgaaagtaaacagcatcgtccaaaaaaaggagcagattaaagcatgaaaaagctgtggggaggccggttccaaaaaacaccggaaaaatgggtcgatgagttcggcgcatcgatccactttgacaaaacgcttgtaaaagaagatatcgcagggtctctcgctcatgcttccatgcttgaaaaatgcggcattttaaccgaagcagaagcggtcaaaataaaggaaggcctgacatcccttttgcacaaagcggaaaaaaacgaactcgatttttcagtcgattgcgaagatattcacctcaacctagaaaaaatgctcattgatgaaatcgggccgctcggcggaaagcttcatacggccagaagccgaaacgaccaggtggcgacggatatgcacctgtatttaaaagggcacactgagcatatcatcgagctgattacggcttttcaacacgttatgatcgaaaaagcggaagaacacgtggagacgatactgccgggatacacccatttgcagcgggcccagccgatctcgttcgcgcatcatttgctggcttacttctggatgctggagcgcgataaagaacgctatcatgattcattcaagcggattaacaagtctcctctcggatgcggggcgctcgccggaacgacgtttccgatcgaccgtgaatattccgcagacctgctcggctttgattcgatatatgaaaacagcctggacggcgtcagcgacagggatttcatccttgaatttttaagcgcgagcagcattctgatgatgcatctgtcaagattctccgaagaaatcattctttggtgctcgcaggaatttaaattcattgagcttgatgacacctacgcgacgggaagcagcatgatgccgcaaaagaaaaacccggacatggcggagctcatccgcgggaaaacaggacgcgtatacggtgatctgatcggactcctcacgattatgaaggggctcccgttagcatacaataaagatttgcaggaagacaaagaaggtatgtttgatactgtgaaaacggtcgaaggaagccttgagatttttgccggcatgattaaaacgatgacagtgaacaaaaatatgatgaaaaaagcaacggagcaggatttttcaaatgcaactgaacttgccgactatctggcgaaaaagggcatgcccttcagagaagcgcacgaagtcgtcggaagacttgtcttcacctgcatcgaaaagggcatttatctcagcggcctgccgtttgaagagttcaaaaaggcaagcgggctgtttgaagaagacgtctacatcgtgctcgacccgcaccatgccgtcgaaaaaagaatgagcgaaggcgggacgggattcaaaaaggtgacagaagccattcaaaaggcgaagcagtgtttgaacaatttttaacacttcccgattcgattcataactgtgcggcttcatacgcaaaataaatttgtgaatcgaaaaggggtgtggcaatgaaacaagatcagtcaaaacacggatatatgtatgatgccgacggagataaagaaaccgttcagcagatctctgatgcttatttcagcgggtttgtcgcgcacgatgacgcacagccgttagctgacgcagataaacaatagaaagctggagcccgtaagagcgggcttcagctttcttccgtctgtcgattgtattccagcggcgattgaaacttcccgatgctccaaatgtgatatcctaagggttttgtagtaaagtataggtagattaatgcaatcatttgcgaataccgagaaccaatgcctgggagggaaagatgtgcgccatgcgttaattactgccggttcaaaaggtttggggcgtaaagtgacggaagccctgcttgaaaaaggctactcagtgacggtgaattacaggcaagacgaagaagctgtccgccgcctcaaagaaaaatggcggtcatcccttgaccgtttgcagtttgttaagggtgatgtcaccaggaaagaagacctgctccggatggtgaatgccgctcttgagcgatttggaaaaattgatcttctgatcaataatgccggcccatacatatttgaacgaaaaaagcttgcggattatactgatgatgaatggtatgacatgcttgaaggcaacttaagctctgtcttccatctgtttaaagcggttgttccgatcatgaggtgccagcggttcggccgaatcatcacttacggatttcagggggccgaccatgcgcctggctggctgcatcgttccgcttttggagcggcaaaagtagggctggcttctttaacaaagacgatcgccattgaagaagcgggctccggcatcacagccaacatggtctgtccaggcaacattgtcggggatatgaaagaggcctcgatttcagaagcgagggcgtcacttgatgaggaaacgccgatcggcaggtcgggaaccggtgaagacatcgcaaggatcatcacttttctatgcgatgaacattccgactacattacgggaacagtcattgaagccacaggcggcttgaatgtgattaaccgtcattctctctagacgtgcgaaattaaaaaaatcaggggtggatatgatgaaagtggcatatcatggtcattcagtggtaacagttgatacgggagatcatcagttgatcttcgatccgtttattacaggaaactcattaaccgatttaaagcccgaagatgtcaaagcggacgtcatcttgctgactcacggacataacgatcatgtcggcgataccatcgaaatcgccaagcgaaacaattcgctcgttgtagctccgaatgaactcgcggtctatctaggatggaaaggcctgaatgtacatccgatgcacatcggcggctcccaccagttcgattttggaaaagtcaagctgacgcaggctttccacggatcggcttatacggaagaagacagccaaaagatcgtctataccggcatgccggcggggatccttctgactgtggaaggaaggacgatttttcatgccggcgacaccgggcttttctcagatatgaagctgatcggtgaattaaatcatatcgaccttgccttcttgccgatcggcgataattttacgatgggccctgaggacgccaaactggccgcagaatggctcagagcgaaacaggttgtcccggttcactactcgacgttccccgtcatcgaacaggatccgcatgcatttgcggacagccttcctggaggcgtcggaaaagtgcttgaggtcggtgagtcaatcgaatttaagtaaatttgttttagagggcccgaatccgggtccttttttcggttgaaccggttatgcgcctatcaaaacatgtccaccatgatataatgtaggaatcggattcatcttggagggtgattatgagggtattgaaatacgcgattttggggctccttgatcatgggagtttaagcggctacgatatgacaagccggtttaaagccgaattgggccaattttggagcgccaagcacagccagatttatcccgagctgaaaaagctgacggatgaaggatttatcgaatttgaaacggtgatccaaggctcaaaattagaaaagaaaatgtattccatcacagaagccggaaagcgtgaacttcacgggtggcttacggaatttaagccggttccagatacggtaaaagatgaatttatgctgaaagcttattttatctcttcgatggaacctgatgaagcgaaaaggctttttaacgatcagcttcaaaagagacaggaaaaagctgcttttttaaacaccaagctcgatgaattgaagcgcgaagcgggtgattcaataacgttccgctcgcctcatttcggccattaccttgtattgacccgggcgcttgagcgggaaaaaggctattgctcatggcttgaaaaagcgcttctcctgatggaggatgataaggcttaggcgggcatgatgttgtgaaggcggattgcggttcaatcgcacaacgatttataataaatatatctagcagtcagaggatgaaggtgaaacgattggcgacaaaacacgaacagattttaaaatatattgattctttgtctgtcggcgaaaaaatctccgtcaggcggattgccaaagaaatgaaagtcagtgaaggaactgcttacagagcgataaaagaagccgagaataaagggtttgtcagcacgattgaaagggtcggaacgatcaggatcgagcaaaagaaaaaagagaatattgaaaaactgacatatgctgaagtggtgaatgtcattgacggccatgtgcttggcggaaaagcagggcttcataaaacgctcaacaaattcgtcatcggagcgatgaagcttgatgcgatgatgagatataccggagcgggcaacctgctgattgtcggcaaccgaatcgatgcgcaccgccaggctttggaagcgggtgctgccgtactggtgacgggcggttttgatacggagccggagattattgagcttgccgacaggctcgagctcccggtcatttctacaagctatgatacgtttactgtagcggcgatgatcaacagggcgatttatgaccagctcatcaaaaaagaagtcgtgcttgttgaggatattttgactcctttagaaaaaacagtctgcttatcacctcatgaaaagctggaaagatggtatgagaaaaactttgaaactgggcacggacgctttcccatcgttgacgagcagatgaaaatccacggcattttaacttcgaaggacgttgccggatatgaccgcagtgtattgattgaaaaagtcatgacgaaaaacccgattacagtgatcggaaaaacgtctgttgcttcagccgcgcagatgatggtctgggaagggatcgaagtgcttcccgtcgttgacgagcggcaaaagctgatcggcatgatcagcaggcaggatgtattaaaggcgcttcaaatgatccaaaaacagccgcaggtcggagaaaaactcgatgacatcgtgaccggcggtttcaaagaatcggaccatgacaaaaacaagccggctccggtctatcaatacgaagtaacgccgcaaatgacaaaccacttggggacgatttcctacggcgtgtttacgacgattttgaccgaagctgcaaaccgctttttgcggtcgcgcaaaaaaggcgagctcgtgatagagagcatgacgatttattttttaaagcctgtgcaaatggagtctgtcattgaaataaaaccgaacattctcgaagccgggagaaagttcgggaaaatggatatagaagtttttcaccagggtgctctagtcggcaaagcgatgatgatggttcagctgatggaaagaagctaagggacgcggtcggtgtccctcttttcgcttatgcgttctcccgttcgttttctttcgcaagcaaagggacatagtgcttataggccttgtagccggcccacatgctcccgagcccggtcagcataaaaataacgccgatgacgacagccagcgtgccgcggtttaaaatcagctgattggcgccgaagaacatgataaacaggcccagactcatgcttgacttggccgaatagtattcccgttcaaccgcttttttggtgcgcacataccttactttgaagtacacataagctatcgctgaaaccacaataaaaaaaacaaaaaacggcataatcgacatcctccattgtaagttttacaaacccattgtatacataatcgggttcgctttctacaataaaaagtcataactttcactttccaccaacaacagattatgatttaatggttaaaaacaaagtaaagaaggggcgcgtcatgaaaaaagaaatcatcagaaccatatcattatatgacacgatcattatacatagacatgtgagaccggatcctgacgcctacggatcccaatgcggccttacggaaatcctgagggcaacctaccccgaaaaaaatattttcgcggtcggagctcctgaaccttctctcgcttttttgtataccccagatgtgattgaagacccggtgtatgaaaatgcacttgtcatcgtttgcgacacggcaaatcaagcgagaatttcagattcgcgctacaacctgggcgacaagctgatcaaaatcgaccaccatccgaatgaagaccggtacggcgaccttttatgggtggatacgagtgcgagctcgacgagcgagatgatttacgaactgtacttagcgggtaaagaacaagcgggatgggcgcttccaacaaagggcgccgaactgatctatgccggcattgtgggggatacagggcgcttcttatttccgaacacgacaaaaaagacattgaaatatgccggagagctgatcgagtatcctttttcttcccaggcgctttttgatcaattatatgagacgaaattaaatgttgtgaggctgaatggctatatttaccagaatgtttctctgtccgaaaacggtgttgcgtcggttttcatcacccgcgatattttacatcaatacaatattacgccgtctgaagcttcacagcttgtcagcacgctcggcaatatttcggggatcaaagcatgggtgttttttgtggaggaagccgatcaaatcagggtaaggcttcgttcaaaggggccgattgtcaatgaagtcgctaaaaaatacaacggcgggggccatccgctcgcagccggcgcttccatctatgactggaaagacgctgatcttgtcatcgctgacctggagcgtatatgcaaagaaaacaaataagaggggaagtccctcttttttgtgcagttcaactgcaagcgcttgcattgcatcttgcaaaaaagtaaacagcagcaaagtgtaagcggatcattttacgcacgacagctgctgtttattcaggtataaaccatgatccgatatctgttacatcctcataaacatggatgttttgggcctttaactcttttttgataagggacgcgagactttcagtttccgcataagccgagtagcccagcttgatccggttgactttatctcttgccagctgatggtaactgtaaatgtacattctgctttcctccctttttaaaaaaacttacatatcgcttactgtcagtttaaattaaaatatggaaaaaagcgacgaatgcatgtgaatcgtaaaaaaaaatccataatttttattcggaaaaagagattttgatttcaacggaaagccgcgtataaatcgtcagttcggtgactttcgccttgtactttttatcgtttatcgtatactctttattttcaatcgtccgctttaaaagctccttcgtccggtagacgctttcgatatcctttgtaatgacatctgaaatgttatcccggatatgctcctcaaagttcatcatgtccggctgtgacagcttgtattgcttgccgttgatcagcttgacgtcgacgctttgaatcagcagttttcttttattgtcttcattcagcttatgcagatcctcgcggtaaatggtgatctggtcatttaaatcattgatgcgctctttctgttccctgatcaagacgacctgcttctcctgaaaggttccgtatgtaaacaggaacacgaaccagctgatgatggctccgcacatcattcccgcaaaaaaacgctgccacccaggctttttataatatggagggattctcatgaggaaatatgctcctgtgtgagccagttgatgatcagataaccggtctgcgctcctcccatcgccgaaagaatcaggagaagctgttttacgatgtctctcgtattgccttcgataatgcccctttcaaagctgtagaccgcatcaaacgtgccgccgattgccgcaaccagcgcccagattttcaggcggtttgcgagacttgtaatgatcgttaaaggcggctgccccgacagataggcgccgatccccccgattaaacaaccgccgagaagcactccaagcgcaataaaataacagctgataaagtttgggaaaaagggctgttcaggatccattccgatcacctcaccttatcacactatatggataaagaaagacaagtatgattgttgatcaaagaaagaacatttgtttctcattcgatcccatcatataatgaaaagagacggctcgaaaaaggaaggggtgacagaaatgccttttgttcacctgcaagtacatagcggttacagcttattaaacagcgccgcttccgtagaggatctcacggccaaagccaaagagctgggctacagcgcaatggcgctgacggatgacgaggtcatgtacggggcggtggaattttataaatcatgcaaaaaacgcggcatcaagccgattatcgggctgacggcttctgttttaacagatgaaaaagagcagctatcatatccgctcgttcttttggcgaaaacaaacaaaggctatcaaaacctgctgaaaatcagcagcgtgttgcagtcaaaatcaaaaaccggcatcaaggaaaaatggctcaaaagctatcatgaaggcctcatcgcgctgacaacgggcgggacaagccatgttgaagcgctgttgaaagaagggctgatcgaagaggcgaaggacgctgccctccgctgcctttcgatctttggagagggcagcttctatttgtcgtatcagccgtacaagggagacccgcttctttctgaacgcattttagagctaagcgaacatacgggaattccgattgccgcaaccggcgatgtacgctacatcgaaaaggaggacgcggcagcttacacgtgtttaaaagcgattaaagcgggcgagaagctgaacgaagacatgaaggccgaaggagatctgcatcttgagctcaagccgcccgctgaaatgctggacatttacagagatcgtccggacgcgttggagaatacagtcaaaatcgcggaccgatgccaggtggacctgagccttggccagacgcgcctgccgaaatatccggcgccttccggcaagaatgccgacgattatttggccgagctttgctttctcggactgaaaaaacggttcgaagccgctccgaaggagtatgtcgagcggcttaagtatgagctgaaagtgattcgcgacatggctttcagcgactattttttgatcgtctgggatttcatgaagttcgcccacgataacggcattatcacagggccggggcgcggatcggcggccggttctctcgtcgcttatacgctgtttatcacagatgtcgatccgcttaagcacaaattgctgtttgaacggtttttaaatccggagcgcatcagcatgcccgatatcgatatcgattttcccgatacgagaagggatgaagttattcagtacgtgaaaaataagtacggggcactgcacgtagcacaaataaccacgttcggtacattggccgcaaaagcggcgctccgagacgtcggcagggtgatgggcatcagtccgaaagaagccgaccagctggcgaagctgattccctccaaacccggagtgacgctgaaagaggcgagagcactttcacctgaacttgacaagcgcctaaacggctcaaaaaagcttcaggacatatttaaaacggcgcagaaaatcgaagggcttccccggcatacgtccattcatgcggctggcgtcgtattgagcgaggagccgctgacgaatatcataccggtacaggaaggtcatggcggcgtatatttaacgcaatattcgatgggctatctcgaagacttgggacttttgaaaatggattttctcggcttgcgcaatttaacgctcattgaatcgatcaaaacgctgatcgaaaaaagcgagcgggtcactatcgatttctcggcgattccctatgatgatgaacagacgtttaagctgctggctgaaggagacacgacaggtattttccagctcgaatcagccggcatgagaaacgttttaaaaaggctcaagccatcgagccttgaagatattgtcgccgtcaatgccttgtaccgcccgggcccgatggaaaacatcccgctgtatatcgaaaggaagcacggacgggttcctgtgtcttatccgcacgaggatttggccgatatcctgaaagatacgtacggcgtgatcgtttatcaggaacaaatcatgatgatcgcatcccggatggcgggtttcaggcttggagaagccgaccttttgcgaagggcggtcggcaaaaaaaacaaggaaattctcgatacagagagaaatcattttattagtggatgtttgaaaaaaggatattccgtacaggcggctaatgaagtatacgatctgattgtgaaattcgccaattacggttttaaccggagccatgccgttgcatacagcatgatcggctaccagctcgcttatttaaaagcgcattatcccctctactttatgtgcggcctcttgacgagtgcgatcggaaatgaggaaaagcttgctcagtacatctatgaagcaaaagggaaagggctgaatgttctaggtccttccatcaataagagcggctatccgtttgtcgtggaaaacggggcgctgcgctacagtttaagagctgttaaaggcgtcgggatagcggctgtaaaagagatctacagagccagaaaagaaaagccgttcgcagatttgtttgatttttgtgtgaggacttctgtgaaaagcgtaaatcggaaaacgattgaagccttaatttttgccggagcaatggatgaattcggtgaaaaccgggctactttgctcgcttctgtcgatgtcgcgctggagcatgccgaattgtttgcaggagacaatgatcagctaggcttctttctcgatgaaggcttgacaatcaagccgaagtacgccgagacggaggaaatgccgctcgtcgacctgctggcacacgagaaggaaacgcttggcatttacttttctgaccatccgctgagcgtccaccgcaagaaactggaccgtgcaggtgcgctgccgattattcagctgctcgcctccggccgcaaaaaagcggctctgggcggacttttgacgaggatgaagacgatccgcacaaaaacgggacagacgatggcttttctggagctgagcgatgaaagcggggaaatggaggcggttgtttttcctgaacagttcaggcagctttccccgatcctggaagaaggcgtatcgctttttgcagaaggacgccttgagacaaggaatgaaaaacgccagctgattatttccggggcatcgctcgtcgaatcgcttcatgcgaaaaagcagccgtccgtctatattaaagtggaggaaagccagcacacccacgatattttcaagaagatcagcagcatcctgcttgaacacaaaggggaaacgccggtctgcgtctattatgaaaaacggaagcagacgatgcagctgccggaaagctataatatcaaggctgatcacgctgctctatacaggcttaaaagcgttgtaggtgagaaaaatgtcgtgctcagatagcaggtatcctgagcatttttgatcaaaaatgcggtcagttgtgttatcatttttaagattctggggttcgtcttacaagaatcttaagcagaaaacgaagcaaagtttttggcaaaattcccttgaaggagtgtttgttaacatgtcattgaaagaaaaagcactgcatatgcacaaagtaaaccagggcaaattggaatcaaaatcaaaagtgcaggttcgcaatgcggacgatttaagccttgcatattctccgggtgtggctgaaccctgcaaagcgatttacgatgataacagcaaagtatatgattatacaatgaagggaaacatggtagcagtcgtctcggacggaacggctgtgctcggcctcggcaatatcggccctgaagccgccctccctgtgatggaaggaaaagtggttcttttcaaaagctttgccggtgtggacgctttcccaatctgtttaaatacatctgatgtcgataaaattgttgagacggtcaagctgcttgagccgacattcggcggcgtcaaccttgaagacattgcagctccaaactgttttgtcattgaagaacgcctcaaaaaagaaacgaaaattccggtgtttcacgatgaccagcacggtacagcaatcgtaacggtagccggtctcgtcaatgcgcttaagctgtccggcaaaacgatgtcttccgtcaaagttgtggcgaacggcgccggcgcagcgggaattgccatcattaagcttctttatcatttcggcgtgcgcgacatcatcatgtgcgacacgaaaggcgcgatctacgaaggccgtccgaacggcatgaacgcagttaaagaagaagtcgcaaaatatacgaacaaaaaccgcatagacggttcgctcaaagacgtgatcaaagacgccgatgtctttatcggggtttccgtcgaaggcgctctgacaaaagaaatggttgaaagcatggctgacaaaccgatcatcttcgccatggcgaatccaaatcctgagatcatgcctgccgaagcgcatgaagccggagcaagcgtcgttggaacgggacgctctgacttccctaaccaagtgaacaacgttctcgcttttcctggcatcttccgcggggcgctcgacgtccgcgcgacacatatcaacgaggagatgaaaatcgccgcggttgaggcgatcgcgtcactcgtttccgacgaagagctgagacctgaatatgtcattccggctccgttcgatccaagggtcgcaccagctgttgccaaagcggtagccaaagccgcgatggaaacaggcgttgcacgaatcgatgtcgatccagaagaagtcgctgaaaaaacaagaaagcttgcagtgattgaagggaaataaaagtccatttttgatcagcgcgtgattgctctggcctaaagagccgtcacgcgctgtttatcgaatatgatgttcggtttttcctcttattggggacacttgtaaggaaatattcgggctgtgaaaatttttttcaaatcgcttttccggacttttgtatccgctctcaaggctgatatatcaatttgtcagtctctaaccgcataaagtgcgattcggctgtttgccggtcaaaaatgtcgaattgaggatgacaccgtttgacaaaaaaagtacaatagtttcggtatagtgatgttctagtctataaacaggacaggcatacatgaagaaaacccttcagaaaagggaggtaatcttttgttaaaagatatattcagcaaaaagaaaaaaaaatacgcttccgttcccgcggaatcagcgaagcaagatgtaccggaagggatcatgacaaagtgcccggattgtaaaaaaatcatgctcacaaaagagctggataaaaatttaagggtctgcatgaattgcggttaccatcttcaaatgaacgcgaagcagcgtataaaaagcctgctggacgatggctcctttgaagaattcaatcaggatatgatgtctgaaaacccgctggagttcccgggataccttgaaaaattgcaaaaagaccgggaaaaaacgtcgctgaatgaagcggttgttaccgggaaagggacgattgacggatctccggcggtcgtggccgtgatggattcatctttcagaatgggaagcatgggatctgtcgttggcgaaaaaattacgcttgcaatcgaaaaggcaagagaagaaaaagtacctttcatcatttttaccgcatcaggcggtgcaagaatgcaggaaggccttctcagcttgatgcaaatggctaaaacaagctccgctttgaagctgttcagcgaagagcagggcttgatcatttcagtgatgacgcatccgacaacaggcggcgtatccgcaagcttcgcatccctcggcgattacaaccttgccgaaccgggcgcgctgatcggctttgccggaagaagaattatcgaacaaaccatccgtgaagaactgcccgaggattttcagactgcggaatttctgttaaagcatggccagcttgattccgtcgttcacagagctgacatgaaaaaaacgctcggcagcattttgaaaatgcaccaaactggaggtgatctcgagtggctggagaattagaatttgaaaaaccggtggtcgaactgcgtgaaaagatctccgaattgaaaaagttcacacaggattccgatatggatttgagctctgaaattacgaagcttgaagctcgtcttgaaaggcttgaagaagacatttatacaaatctgaaagcctgggacagagtccagattgcaaggcacccgaaccgtccgacaacgctcgattatatcgaacatctctttaccgatttttttgaatgccacggagatcgttatttcggtgatgatgaagcaattgtcggcggaattgccaagttccggggtcttcctgtgacagtaatcggtcagcagcgcggcaaggatacaaaagaaaacatccgccgcaatttcggaatgccgcatcctgaaggctaccgcaaagcgctcaggctgatgaagcaggccgacaaatttaacaggccgatcatctgctttattgatacaaaaggagcatacccgggcaaagcagctgaagagcgggggcaaagcgaagcgattgccaagaatctttttgaaatggcgggactctccgtgccggtcatctcgatcgtcatcggggaaggcggcagcgggggagcgcttgcgctcggcgtcgcaaaccgcttattgatgctggaaaactcaacttattcggtgatctctcccgagggagctgctgctatcctctggaaggattcaggactcgcgaaaaaagcggcagaaacaatgaaaatcaccgctccggaccttaaagaattggatattatagatcatgttataaaagaagtaagaggcggagcacaccgcgatgtggagcagcaggctgcctacatcgacgaagcgctgaaaggcgagcttaaatccctgctgaaactggataagaacgagctgatccaacaaagatataacaagtataagtcaattggaaaaatttcgactgaaaaccaatatgttgggataaaataaataaacgtgaggcctttggctcacgtttattttttatgggtgaaggtgaaaagtgaaaggattgtgtctgccgcccgcgatttttcaaagagtttgcttaaaatttatttaaaaactttttgtttaattgtataatgagtaaggttttatagggattttcggaaaactttcatccctttttcattgttttagcggcaatgaacgtgttaaggtaaattatatatgttttcgaggtgaaaaagatgaaacgtatcggagtattgacaagcggcggagattccccgggaatgaacgcggcggtccgcgcggttgtcaggaaagcgatctaccatgacgtagaagtatacggaatttacaacgggtattcaggtttaatcagcggaaaaatagaaaagcttgaaatcggttctgtcggagatatcattcaccgcggaggaacgaagctatatacagcaaggtgtcctgagtttaaaacggtagaaggacgggaaaaaggaatagcgaatttaaaaaaatatggtatagaaggattagtcgtcattggcggcgacggttcttatatgggagccaaaaagctcacagaacacggttttccttgtgtgggagtgccgggaacgatcgacaatgacatcccaggcacagatctgacgatcggattcgatacggcgctaaataccgttatcgacgccatcgataaaatcagggatacagctacatcccatgaacgtacatacgtgattgaagtaatgggccgccatgccggggacattgctttatggtcaggtttggccggaggcgcggaatccattttgattcctgaagccgactacgatatggaagaaattattgcaaggctgaaaagagggcatgagcgcggcaagaaacacagcatcatcattgtggcggaaggcgtcggcagcggcgttgaattcggaaaaagaattgaagaagccacaaatctcgaaactagagtatcggtgcttggacatatccagcgcggcggttccccgactgcagcagaccgcgtattggcaagccgtctaggggcatttgcggttgaactgcttcttgaaggaaaaggcggacgttgtgtaggaattcaaaataaccagcttgtgcatcatgatatcattgaaatactcgagcaaaaacatacaattgatcaaagcatgtaccgcttgtctcaagaactgtcaatctagtgtaaaacccgaggaggaagcaatatgagaaagactaaaatagtttgtacaattggaccggccagcgaaagtgttgaaaagctcacccagctgatggaagccggaatgaacgtggcgcgcctgaacttttcccatggagatttcgaagagcacggcgcaagaattaaaaacattcgtgaagcagccggcaagctgggaaaagatatcggcatccttcttgacacgaaagggcctgaaatccgcacgcacacaatggaaaacggttcgatcgaactggcagcgggttctcagctgatcgtttcaatggacgaagccatcggtacgcctgataaaatctcagttacatatgatgggttgattcacgatgtgtcagtcggttcaacgattttgcttgacgatggattgatcggacttgaagtcactgacataaacaaggacaagcgtgaaatcgtcacgaaagtgatgaacagcggaacgttgaaaaacaaaaaaggcgtgaatgtgccgggcgtcagcgtcaatcttccgggaattacggaaaaagatgcaaacgacatcgtattcggcatcgagcagggcgttgatttcatcgcggcatcctttgtgcgccgtccgtcggatgtccttgaaatccgcgaacttcttgaagagcacaatgcggcagatattcaaatcattccaaaaatcgaaaaccaggaaggcgttgacaacatcgatgccattcttgaagtatcagacggtctgatggttgcgcgtggagacctgggtgtagaaatccctgccgaagaagtgccgctcgttcaaaaagaactgatcaaaaaatgcaatgcgcttggcaagcctgtcatcacggctacccaaatgctcgacagcatgcagcgcaatccgcgtccgacacgcgcggaagcgagcgacgttgccaatgcgatctttgacggaactgacgcaatcatgctttcaggtgaaacggcagcgggaaattatcctgttgaagccgttcagacgatgcacaatatcgcttcccgttcagaagaagcgctcaaccataaaaaaatcctttccgcacgaagcaagcaagtcagcatgtcaattacggatgcgatcggccaatctgtggcgcatacggcaatcaaccttgatgtgaatgccatcgtcacaccgacggaaagcggccatacggcgagaatgatttccaaatatcgcccgcaggcgccgattgttgcagttacggtaaacgatgcggtgtcaagaaagctgtcacttgtgttcggcgttttcgcaacaagcggacaaaaccacagctccactgacgaaatgcttgaaaaagcggtgcaaaaatcactcgatacaggcatcgtacgccacggcgacttgatcgttatcacggccggagctgtcggtgaagccggtacaacaaacttgatgaaagtgtatgttgtcggagacgtggtcgcaaaaggccagggcatcggacgcaaatccgcatttggtgaagtagtcatcgctcaaaacgcacaagaagcggccaaaaaaatgaaagatggcgccgttttagttacaaaaagcacggatcgtgacatgatggcatcccttgaaaaagcggctgcgctgattacggaagaaggcggcttaacaagccacgcggcagtcgtaggcttaagcctcggcatccctgtcatcgtcggaatggaaaatgcgacttccattctgaaagagggagaagacatcacggtcgactccgcccgcggagctgtatacaaaggacgtgcaagcgtgctttaatcgcttattgaagaagaagggaagctttccccttcttttagatttatgacaaaatcctaaaacgtttttcagttttaggattttgtcatccttcaattcagcgtgattgaaaacccttgcagtctaggaaggccgagcatcggagcggagcgaatgttggaattcgtgagcaccgacgcgcaggcctgacaacgaatgcgagggtttgacaacacgctggaagaagggaagctttcccttctttttttgcaggcggcacaagcaaaatagggcggccgttcgcttccaatttagaattatgaggtgaaaaaaatgaagtttttcttattatttctcgtcatttttccagcgagtgaaatcggtctgttcctcttgtccgctaattggatcggtgtgctgccgaccgttttgctgatcattttgacgggctttctcggggccgctctcgccaaaaaacaaggaatcgaagtctactacaaagtccagcgcgatcttcagtacggaaagatgcctggggccgcgattttggacgggctttgtatgttcatagggggcatgctgcttttgctgcccggttttttatcggatatcatcggtttactgctgctgctgccggcaacgcgcggccgtttcaaaccatttatctcccgcaagctgaagagaatgtctgaaggcaggcggatcaacattatcaaataacccgagataagcggcagcccgcatggaaaagcatgctgccgcttatttttcatttcctttaataaacagccatatgtctctaaaaatacctgttgtaaagagagcctgaataagaacgagaagggcggggcccatgatcaatccgagaaagccaaacaatttgaaaccggcaaacagcgcgattaatgttcccaaagggtgaagtccgattgaccggcttaaaatcttcggttcggcaagctgcctgaagacaagtacgacgatgtacagaattccaaggccgatcgccagcggcagctgcttggccgctgctaaatagacaatccacggcacaaatacagaccctgttcccaaatacggcagcaggtcgaccagcccgatcagaaaagcgatcgccacagcatgattgactttcaacacggaaagcccgatcaacacgagcaccatggtcatcgccacaagggtaagctgggccttcacaaagcctgccagcgcttttttcaattccgcatagacagccgctgcacccgagatcagccgatcaggaagcacagaccgcgccttgttttgtattttatgcagatctttgctgataaaaaaagtggccaggagcgaaaagatcagcacggccgccatattcggcagaaaggcgaaaaagaggggcaccgtctcaagaatttttgaaagcaataaagccgtgcctgaagcgagttcactgcccaaattttggacctgtgtaatgatcgattcctgctgggcggcttcaaggccgtcaaaaaaagcggccagctgattatacagcggcatgatctgatccgtaaaaaacgattcgatataaagagcggctttattaaactggaggggaagtattttagccaaataggccgttccagagacgatctcggcaacgaccagtgtcaaaaagccggctccggcggtcaaaaagccgaacagaacgattccgacattgacgcctctcgggaacccggtcagcttatcgagccattccacaaaaggattgatcatgatggcgagaataagcgcaatcacaaaaggataggttaacggaaaagagtagtagccgaccgctccgcaaacagcggtcaaaaacagcacatacactgcccgaagcgcagctgtaagataggattggttcaattctgcatcctcctgatattagaaagcatgtccttatttcattttattcttaagtcctgttattatgagaaaggtcataaaaaaatggagttgaatacagcatgtttactcaagctaatttatttttgatcctgcttttggccatcgctttaatcgcgaaaaatcagtcgttgatcatcgctgtatccgtcctgcttttgatcaagctgatcggcctcgatcaaaagctgtttccagccatccaatccaaagggatcaactggggcgttaccgttattacaattgcggttcttgtgccgatcgcaacaggagagatcggctttaaacagcttggcgaagcgatgaagtcatattacgcatggatcgcactcggagcgggcattctcgtagcattgatcgccaaaaacgggatcacattgcttgcagaagacccgcatatcacgaccgctcttgtatttggaacgattttagcggtcgctttcttcaaaggcgttgccgtcggcccgctgatcggtgccgggattgcctatcttgtcatgcaggccgtccagcatttcacatcttagaaatgtgcgcgctccccctgtttcagggggtttttttgtttgaaaaaaactttcgctactaaaaaaatttcagccccgtatttttttaaaaaaacataattaaatgtaaataatacagttaaaactactaagaatctgtaaatagaagtcagctgggccaaaaaataagaaaaaaaaactatagttaaacatttaacaaatgtctgataattgtttataatataaatatgcttaatctttattaagcatatcggagtatcgaacggtatatagaaacgcacgattgttttatttgaaaaacgatttaatgtaagcattttctttttggattaaagaagatgtatacgtcatgcgttgtttttgctcctgggttttggtttaattttaaaaggggaaatttttaaaaaaagggagagatgagtatgacagcaacacgcggccttgaaggggtagtcgccactacatcatcagtaagttcaattattgatgatactcttacatatgtagggtataacatcgatgatttgacagaaaaagctagctttgaagaagttgtttatctgctttggcatttaaagctgccgaacaaagaggagcttgccgagcttaaaaaacagctttctgaaaatgccggcatccccaaagaagtcattgaccatttcaaatcctacccgaatggaaaagtccacccgatggcagctcttcggacagccgtttctttactcgggctgtttgacgaagaagcagatcaaatggatgcggaagcaaactacagaaaagcggtgcgtctccaagcgaagatgcctgcgcttgtcgctgctttttcaagaatccgcaaagggcttgagccgatcgagccgaatccggaactcggctttgcagccaactttctctacatgctgaatggaaaagaaccttcacctgtcgaagtggaagcgtttgacaaagctttgatccttcatgcggatcatgagctgaacgcatctacgttcacagccagagtatgcgtcgcgacgctttcagacgtttactcagggataacggccgcaatcggagccttgaaaggtccgcttcacggcggagcaaacgaagcagttatgaaaatgctttcagagattggcgaggttgaaaacgtagattcatatatccacgccaagcttgaaaagaaagaaaagatcatggggttcggccaccgcgtataccgccagggcgatccccgcgcaaaacatttgaaggaaatgagcaggcgtttgacgaatttaacgggtgaaagcaaatggtatgagatttcagagcggactgaggaaatcgtcacgtctcagaaaaagctgccgccaaacgtagacttttattctgcgtcggtttatcatagcttaggaatcgaccatgatctgtttacgccgatttttgcgatcagcagggtatcaggctggctcgctcacattcttgaacagtatgaaaataaccgcctgattcgtccgcgggctgactacaccggccctgacatgcagacgttcattccgattgaagaaagaagctgaccgtttgaaaagaggctgctcgagcttcgttcggccggcctctcaacggcttttctatggaagcaatgaattaatgaatctatgaaaaaacatgtttgtcccccgccaaacgggggaaacaaatgtttttctatattgaagaattacatattatgggaggttttattgtggcacaaggcgaaaaaattacagtctccggcggagtattaaacgttccaaacaacccggtcatcccgtttattgaaggggacggaacaggtcctgatatttggagagcggcttccagggttcttgaagcggctgtggagaaagcgtataacggcgaaaagaaaatcacttggaaagaagtctacgccggggaaaaagcgtacaacaaaaccggcgaatggcttccggaagaaacgcttgatacgatccgcgaatacctgatcgcgattaaaggtcctttaacaactcctgtaggcgggggaatccgctcattaaacgtagcgctcagacaagagcttgacttgtttacatgcctgcgtcctgtccgctatttcacaggcgttccttcaccggttaagcgccctgaagatacggacatggtcatcttccgtgagaatactgaagatatctacgccggcatcgagtatgcgaaaggctctgaagaagtgcaaaagctgatttcattcctgaaaaacgagcttggcgtcaacaaaatccgcttccctgaaacatcgggcatcggcatcaagccggtttctgaagaaggaacatcaaggcttgtcagagctgcgatcgagtatgcgatcgagcacggccgcaaatctgtgacgctcgtccataaaggaaacatcatgaaattcacggaaggcgcctttaaaaactggggctatgaagtggctgaaaaagaattcggtgataaagtattcacctgggccgaatacgaccgcatcgctgaaaaagacggcaaagacgctgcaaacaaagcgcaaagcgaagctgaagctgccggcaaaatcatcatcaaagacagcatcgccgacatcttcctgcagcagattctgacacgtcctgccgagtttgacgttgtggcgacaatgaacctgaacggggactacatttcagatgcgctggctgcccaagtcggcggaatcggcatcgcacctggagcaaacatcaactatgagacaggacatgccatctttgaggcgacacatggtacagcgcctaaatacgccggcctcgacaaagtaaacccgtcttcagtcatcctatccggcgtgctgcttcttgagcatttgggctggaatgaggcggccgaccttgtcattaaatcaatggagaaaacaatcgcatccaaagtcgtcacatacgatttcgctcgtttgatggacggcgcgactgaagtcaaatgctctgaattcggtgatgagcttatcaaaaacatgtcttaaacggctgttttggggtaaaacaaacaacaattaaaaggggtagaaaaaatgggaaagaagcgaaataaagtatctgtcatcggagcgggttttacaggtgcaacaactgcgtttttaacggctcaaaaagaattggccgacgtcgtattagtcgacattccgcagctcgaaaaccctacaaaagggaaagcgctcgatatgctggaagcgagccctgtccaaggatttgacgcgaatattacaggaacggcaaactatgaagatacggctggttcagatatcgtcgtcatcacggcggggatcgcaagaaagccgggaatgagccgggacgacctcgtggctacaaatgaaaagatcatgaggagcgtaacgaaggaagttgttaaatactcacctgattgtatcatcatcgttctgacaaaccctgtagatgcgatgacatacgccgtctataaagaatcgggcttcccgaaagagcgggtcatcggccagtcgggaattttggatacggcaagattcagaacgtttgtcgctcaggagctcaacctttccgtcaaagacattacaggttttgtactgggcggacacggggacgatatggttccgctcgttcgctactcttatgcaggcggcattccgcttgaaacgcttcttccgaaagaccggatcgatgcgattgttgaaagaacgagaaaaggcgggggagaaattgtcaacctgttaggaaacggaagcgcgtactatgcgccggccgcttccctgacagaaatggttgaagcaatcttaaaagaccagcgccgcgtgctgccgaccattgcctaccttgaaggcgaatacggctatgaaggcatttatctcggcgttccgacgattatcggcggaaacggtcttgaacagatcattgaacttgaactgactgaaaccgaaaaaagtcagctcgataaatccgttgaatcagtcaaaaacgtcatgaaagtattatcataataaacacggcaggaaggctttatacaagccttcctgtttttgaatgcgaaccttttacataagacggtatgaaacaagacataaacacgggctgtcagcatatacctaatcataatcatctgcccggacattttcattctttttgatggaggccgctggctgcatggggattccatcacttaaaacagcggcttatggccgaaaaagagagattttaagcaaaacactgaaaaatcaaattgtcgaacggataggctttcgttaaaataggagtgaaaacgtttatttaacaaaagatagagaaagagatgtcggggaaatctgaagcctggaggcatgtcatgagcaaaaagatattagttgtagatgatgaggaatcgattgttacccttctaaaatataaccttgaacggtcgggctatcatgtggtgaccgccatggacggagaggccggcttattaaaggcgattgaagagaagccggatctgatcgtgctcgatctgatgcttcctaaaatggacggcattgaagtatgcaaggaactcagacagaagaagctgatgtatccgattttgatgctgaccgcaaaggatgatgaatttgataaagtgctcggtctcgagctgggtgccgatgactatatgacaaagccgttcagcccgagagaggtgacggcaagggtcaaagcgattttaagaagaacacagacgctgtccgttcagccggaggagacggaagaaccggatgcaggcgagctgatcataggcgaactgaaaatactgcctgaacattatgaggtttattttcaaaacgaacgcctcgagctgacgccgaaggaattcgaacttctcttatatttgggaaggcataaagggagggtgctgacgagagaccttctcctcaacgctgtctggaactacgacttcgcgggcgatacgcgcatcgtcgatgtccacatcagccaccttcgcgataagatcgaaaaaaatacaaaaaaaccggaatacattaaaacaatcagaggtcttggctacaaaatggaggagccgaaactgaatgattaaattccggacccggcttttagctgccctgctgacgcttttgattctcgtatttgcttcactcggttttctgctcgttcacttgtttcactcctcttacgatgccaaactgagcagccatattgaaaaagaggccgctttggtcgcttcattggcaaatggtgaaaacatgaagtcttcggagcaaggagctattttagagaaggcaagccgtgaactggacagtcgtgtatcgcttattgatacaaaaggtcaggttctttttcattttgggggccgcgccgaagagcaatccgttatcaaggaagcgcttgagtcggatttaaacggtgaaggaggaggcttcaggatcaaccctgatgacgagtccgtttaccgttacgtgcagccgctcaaagatgacgggaatgtgaatggatatattctgatcagcactcctgtcgattcattgcaagacatcaatcaaaagatctggattctcctcggcgtgagccttggaacggcctttttaatcatcgccgggcttggggcgagaataacctctcaatatacgaatccgattgagtctgcgacacaagtggcgattgagcttgccaaaggaaactataaagcaagaacattcaacgaagatgaaacgatgctgagccagtccatcaatatgctggcgcagaacctgcaggacatgacaagagcccaggaaatgcagcgcgaccgtctgcaaaccgtcatcgaaaatatcgattccggtctgatcttaatcgacggaaagggttatattcaccttgtgaaccgcgcttatcaaaagcaatttcacgtagaagccgatcagcttctttaccatttctatcacgaagtgctcgaacacgaagagatcattaatctcattgaagaaatttttatgacggaaacaaaggtccgcaaaatgtttaaactgccgatcaaaattgaaagaaggtattttgaagtcgacggggttccgattatcggcatcaatgatgagtggaaaggcatcgttctcgttttccatgacatgacggaaagaaagcagcttgaagaaatgaggaaggactttgtcgccaatgtctcccatgagctgaaaacgccgattacatcaatcaaagggttcaccgaaacgcttctggacggagcgatgaacgaacgggagacgctgttgcagtttctatcgatcatcttaaaagagagcagccgtctgcaaaccttgatccaggacctgttggatctgtcgaaaatcgaacagcaaaacttcaccctgaatattcaaaattgcaatatcggtgaaatcctcgccgaaattgagatgcttttgaagaataaagcggaggaaaaaggaatcaccttgacactggaaaagccggataagccggccgttgcttccggagacccgcacagactaaagcagatctttttgaatttggtgaacaatgcgctcacatatacgcctgaagatggaagcgtgacgatttcggctgatgttctggaagatgcagtgcaagtcaaagtgagggatacgggcatcgggatcaagcagtccgaaatcccgaggatatttgaacggttctacaggatcgataaagacaggagcagaaattcaggaggaaccggtctcggtcttgcgatcgtcaagcatttagtcgaagcccaccaaggcgaaatcgacgtcgaaagcgagcggggaaaaggcaccgaattcacggtccgcttaaaacgcgcatccgagtagcttcatttagcaaactttacaaaggcttaacaacttttatatatatggttaaaacttggctgataggatcattagtgaaccccttcatccaaggagccatatggacggacgcgatcaacagcgcgtccctttttttatttttctgcgaaatcactctcattttcctttcaaaatgaactttgctaaaataaaataagcaaatatgatcacgaagttgaatggaagctgacgaatcggctccttaggaggataaagatgactgaaagaaaaaaattagtattggttgacggaaacagcctggcttaccgtgcgtttttcgccctgcctcttctcagcaatgaaaaagggatacatacaaacgcggtgtacggttttaccacgatcttaatgaagatgcttgaagaggaaaaaccgacccacatgctcgtcgcttttgatgcggggaaaacgacattcagacataaaacgtttaaagaatataaaggcggcagacaaaaaacgccgccggagctgtcagagcaattgccgtttatccgcgagctgctcgacgcatatagaatctcaaggtatgagcttgaaaactacgaggccgatgatattatcggcacccttgccaaatcagcggaaaaagacggatttgaagtgaagattttttccggcgacaaggacctgacacagctggctacagaaggaacgacggtcgccatcacaaaaaagggcattacagatgtcgaatactatacgcctgaacatgtccgggaaaagtacggacttacccctgaacagatcattgatatgaaagggctgatgggagactcgtcagacaatattccaggcgtgccgggagtcggcgaaaagacggcgatcaagcttttgaaacagttccatacagtagaggagctgctgtcgtcaatagacgaagtcagcggaaaaaaactgaaagaaaagcttgaagaatttaaagaacaggctttgatgagcaaagagcttgcgacgattacgacagaagcgccgcttgaagtcagcctcgattccctcggatatgaaggttttgacagggaagcggtcgtcaagatttttaaagatctcggctttcattctttgctcgaaaggattggcgaagaggcgggagagaaagaagaagaacagttggaagagatcgatgtcatgatcaaaacagacatcacggatgacttgtttgcgtcaccggcttcactcgtagtcgaacagctcggcgacaattatcacgaggcgccgatcctcggtttttcgatcgtcaacgaacacggcgctttcttcattccggaagagacggccgttcagtcggaccgttttaaagaatgggccgaagatgagtcgaaaaagaaatgggtgtttgatgcaaaacgtgcggcggtcgctttgcgctggcggggcattgaactgaaaggcgctgagtttgacgttcttcttgcggcctatatcatcaacccggggcactcctacgatgatgtggcaagcgttgcgaaagaacatcaattacacatcgtttcagcagatgaagcggtctacggaaaaggagcgaaacaggcggttccggatgagaaggagcttgccgaccatttagccagaaaggcgaaggcgatatcgctgctgcgcgaaaagctccttgatgaactggaagaaaacgagcagctcgaactgtttgaagcgctcgaaatgcccctcgcccacattctcggtgagatggaatcgatcggtgtccaagtcgatgtcgacagactgaaaaaaatgggtgaagaactgtccgctaaattagcggaatacgagaaaaaaatccacgagtcagcaggtgaaaccttcaacattaattcaccaaagcagctcggtgtgattttgtttgaaaaactcgggctgcctgtcgtcaaaaaaacaaaaacgggctattcaacttcagccgatgtgcttgaaaagctgcgcgataaacatgtcattatcgaagatatcctgcactacaggcagattggcaagctccagtccacatacgtagaagggcttttgaaagtgatcaaaaaagacagccataaagtgcatacccgctttaatcaagctttaacacagacgggaaggctcagctcaaccgatccgaatctgcaaaatataccgatccgccttgaggagggccgcaaaatccggcaggcgtttgtcccttcgcaaaaaggctggctcatatttgcggcggattactcacagatcgagctgagggttctcgcccacatttcaaaggataaaaatttgattgaagcgttcacgaacgatatggacgttcacacaaaaacggcgatggacgtttttcatgtatcagaagaagaagtcacccctgcgatgagaaggcaggcgaaagcagtcaatttcggaatcgtctacggaatcagcgactacggcttgtcgcaaaacctgggaattacaagaaaggaagcggcagcgtttattgaacgctatttccacagcttccagggagtcaaagaatacatggaagagaccgttcaggaagcgaagcagcgaggctatgtaacgactcttttaagccggaggcggtatataccggaattgacgagccggaatttcaatctgcgcagctttgccgaacggacggcgatgaacacaccgatccagggaagcgccgcagatattattaaaaaagcgatgatcgacatggcggacaagctgaaagaaaaaaatctccaggccaaactgctgctgcaggttcatgacgaattgatttttgaagcgcctgaagatgaaatcaaagtgcttgaaaaactggttccggaagtcatggaacatgcattggagctcgatgttccactgaaagtggactgcgcttcagggccttcatggtacgatgcaaaatagagaaaaggaagtgatgatgtgccggaattaccagaagtcgaaacggtccggcgcactcttgccgggcttgtaagagggaaaacgatcgatgcggttgatgtcagatggacaaaaatcataaaacgtccggaggagcctgaggaattcgcaaggctcctggccggccagacgattcagtcgatcggaagaaggggaaaattcctgttgtttcatcttgatgactgtgtcatggtttcccatttgagaatggaaggaaagtacgggcttcatcaaaacgatgaaccccttgataaacatgtgcacgtcattttcaggttcacggacggaagcgagctgcgctaccgggatgtcagaaagttcggcaccatgcatttgtttaagccgggagaggaactgacagagctgcctctcaggcagctcggccccgagcccttcagcagcgaatttacagccgattacttaagagagcgcctgaagaaaacaaaccgctcggtgaaaaccgcgctgctcgatcagcggacagtcgtcggactgggcaatatttatgtcgacgaggctttgttcagagccggtatccatcccgaggcaacagcgaacaagctcacaaaaaaacagacggttcttctccataaagagatcattcaaacgttaaaggaagctgttgaagcagggggaagcacagtcagatcttacatcaattcacaaggtgagatcggcatgttccagctcaaacttttcgtttacggcaggaaagatgaaccttgtaaaaaatgcggatctccaattgaaaaaacagtcgttggcggaaggggcacgcatttttgcataaagtgccagaaaaaatgacaatcgcatagaaggacaaaagcaagccgtatcatggttcaagctgtcggtgcatacgctccatatagctgttaaaagcaagctttaaggtgtgatgtttctttttcgggtgaacaacacacggatggttttcttctttcatatatataagaagcctagaaagctgcctttaggctgcatgacttacactgctcgcatcaacagaaaggaagagcctgatatgatgtttgcatctttcttgctgctggcatttgccgtcagcttggacagtttttcagtcggatttacttacggattgcgaaagatgaaaatcccatttaaagcgattttgattattgctttttgctctggtgccgtgatgtatattgccatgatgatcggaacccttttggcgaaattcctgcccgttgtcgtaacagaaaggctcggagccgtcatcttaatggggatcggcgcatgggtgctgtatcagtttttcaggccggagaaagaacaggatctcgtcttctctgaaaaaacgctcattaaccttgaattgaaatcgctcggaatcgtgatacacatattaagaaaaccgacaagcgccgacattgataaatcaggaatcattaccggtatagaagctttccttctcggtttcgccctctctattgacgcgttcggcgcagggatcggcgcggccgcgctgggcttttcccctgtaccgatgagcattacggtaggcatcatgagctcattgttcgtattttgcggaatacaggcaggccgatttttatcgaaatggaactggatggataaactgacctttcttcccggtatattgctgattatgatcggcatctggaaactgtaagaaggaggtgcaggcctttgacattggtcatcgggttaaccggggggattgccagcggcaaaagcactgtcgcgcaaatgttccagcagtgcggcatcacggtcgtcgatgcggacgtgatcgcgaaagaggccgttgaacaggggatgcccgcttatcagaaaatcgctgagacatttggtgaaggcgtgctgcttgaaacaggcgatatcgaccggagaaaacttggagaaattgtttttgctaatgaagaaaaaaggctgcagttaaatgcaatcgtccatcccgaagtgagaaaaatgatgatcaagcagcgcgacgaagccatccgggccggtgaacggtttgttgttctcgatattccgcttttatatgaaagcgggctcgaacatttgacagataaagtgatcgttgtctgggttccgatggagcttcagcttgagcggctgatgaaaagaaaccggcttaataaagacgaggcgctgaacagaattcacgcccagcaatctcttgacgaaaaaaagaaaagggcagacgcggtgatcgataacagcggcagtctgaaagatacagaagcgcagcttcatcagctgcttgatacatggtcaaatattgaaaagtgagcgcaatgtcgcgctcacttttttgattagtcttttttaaactggctgtaattcgcatagtacagagcggtgcgctgcgcacctgcgtaccgtttggcaaaagctttggcattgccggccttcatcgtccgatagctgtagttggatgaaggtgtccagcttgtctcaggcgatttctgcccctttatcgccggatatgacccgacatctttaaacgcgccgtctccgtaatcatccagtatgcctttctcattgcccgtgccgaagtaattggcttcagaatatattttcgccaatgtcgtaatcgtgaagccaaggtggtaattgttgatataattgcttttcacgtgataatagccgtaacgcatcaacccgggcgccctgacatagagattctcaaagcgattgtggctgattgtcatccgcggatagccattatatatactgtggtattgcttgtcatcttgaggccagccgagaatcaggccgtacctgtggtctgtgaatgtgctgtgcgacagtgtgacgtaatcggctttagcgccgacgtataagagcttgtcgagatcgtggccgtttgccgtatagctgtggccttggaatgtgacgtggtcaatccagtagtttctcgaatcggtaatgtaaacagggatgtcattgttttcatttatggatgcatcatgtgcaatgaccagatttttgaaaataacgttgccagagtccgcttttgttttaaagtaaatgttattcagcttatgtttttcatacgagccgatgattgttttattggcgcccaccgttaataccgttttggctgaagcgccgatattgctggagacgacaatcgtgcgcggcgttgaatcttcaatattggccttcagttcgcccagattattgacatagacgacttttccaagcaggccgccggttgtgcctgttttctgcttgccgttcgtttcccttgcatagcctgcgaaaccttcgagcccgtcgcttggaagcttccacttttggacggagctgcccgtatatttggcaagcttcactccgctgccgtccagtgtcagtgcaaggctgctgttttgtgcactgacgattttatacgtgataaaatctccgtttccgtctttgtcggccccgatgatattccacaactcttccttccgtgaattgtcatagtagaccacagccggattattgtctgacagtgcgtaatgggcagggatgataattttgccgctatccatatttctgattttgaattgtttgccgtcagacgtatcaagcctccatctttcttctttttctccgctcgtctgttttgctgttagcggtgcgttgtcttgattcccggcgggcgtaatatttaagcctgatgagctttccagcctgatcatctgttccggataatcttcgtttgccgcagaagcagcgactgtacctaataaaaaataaatgccggccgcagccaaaaaagaaatgataaaagatgcgtttttgatcagtttcatggttgtccttccttgaagacactgccttctgtcggtgaaaatttagcgctgttgcaaattgtagcaccaaaggtgtatttgaaatatatgctttagggccgattttttttagtcttttgttcacgatttcacaaaagtgcgtaaatttgctgtgaaagcaacaaatggtatggctaattaaaaataatgtgttatacttattttgaataaatcatgatgtggaatgacataaaataaggggtgcatatttgatgaaagtgaaagttgcgataaacggattcggccgaatcggcagaatggtgtttagaaaagcgatgcttgatgaacagattgacattgcggtgatcaatgcgagctatcctccggaaacgctcgctcatttaataaagtatgacacaaatcacggccgttatgaacttgatgtaaaggctggagacgactgcctgttcgttaacggtaaaaaggtcatgctgaccaatcagagggaccctaagcttcttccatggggacaatacgggatcgacatcgtcgtggaagcgacggggaaattcaactcaaaggaaaaagcggaagcacatattgaagccggcgcgaaaaaagttattttgacggcgccgggcaaaaatgaagacatcacaattgtaatgggtgtcaacgaacgcgattttgatgcggagcgtcatacgattatttcaaacgcttcctgtacgacgaattgtctcgctccagtcgcaaaagtgcttgatgatgcattcggcattgaaaacggcctggtgacaaccgtacacgcttttacaaatgatcaaaaaaatattgataatccgcacaaagacttgaggagggcgcgcgcctgcggatcttcgatcattccgacaacgacaggcgccgcgaaagcgctgtcacttgtcatgccccatttaaagggtagaatgcacggcctggccctgcgcgttcccgtctcaaatgtgtcgctcgttgaccttgtggctgatttgaaaagcgatgtgacgtcggaggatattaatgaggcgttccgcatggcggcggcaggctccatgtccgggatcatcgatgtatgcgatgaaccgctcgtttcatccgattttaatacgaatccatactcggcggtgatcgacagtctttcgacaatggtgcttgaaaacagaaaggtgaaagtgctcgcatggtatgacaatgaatggggatattcgtgcagggttgtcgatttgatcagatacgcggcttcaagaatgaaacacccctcagctgtataaaataagagcatggacggataaaaaaataaataccccttaaccatcaaatgataaaaccgccttgcaaaaaatattcaaacaaagtatactatttttcgtgaacttctagttcgtgagcgcttcggcattacttaaagggttaggacctctccggactaactttcccccgtggtaattgaccggttcagttgcttggaaattcacttttttaattcttgttaaggggggtccatgctatggaaacaatggggcgtcacgttatctccgaactgtggggatgcgattttgataagctgaatgacatggattttattgaaaaaacgtttgtaaatgcggcactgaagtcaggtgctgaggtacgtgaggtagcctttcataagtttgcgcctcaaggtgtaagcggagtcgtgattatttcagaatctcacttgaccattcacagttttcctgaacacggatatgccagcattgatgtttatacttgcggagatttagatccgaacgtagctgccgattatatcgcagaagagttaagagcggaaacaagagagaacattgaaataccgagaggcatgggacctgttcaggtgaaacaggccaaagccaaagcacaggcactttaatgccgatagaggagctggatgaaaaagcggacaccgcttttaaaatccgctcctttttctttcctctcccgaaaatccccaaaccatattccccggcattctcttgctgttttgttttcccttggaaatcaaccatttttttaataaaatatagagaagaaagacaaaggggacaggggatatgagtctttttcaaaacattcaacggtttttttctacacacgccgaaacgtctgaccgccatccttcggaagagctgaagagccgctattataaagcggcgtcaaaagaagcgctcaatgctgtaaaggaagtgctggaaggccttgacggctgcaaggtgacgtcagtgtcggaggaaagaggagaaatcagcgccgaagttaaaaaaacgagaaaagcttttgtggtggcgacagtcgtttcgattcggccttttgatacagcggtggactttaatgtgtcaactgaaacgtttttgccgaccgattttggctacagccgcgggcttgtctcgacgctatacagcgaactggacggaaagctgcaggaatctgtacattcaaacaattgaataggagctgaaaaaatgaaatgtccagcatgtcagcataatgggacgagggttttggactcccgtccggttgacgaaggcagatcgattcgcagaagacgcgaatgcgaatcgtgcaactatcgatttactacatttgaaaaagtggaagaaattccgctcatcgtcgtaaaaaaagaaggaatccgggaagaattcagccgcgagaaaatgctccgcggtttgatcaaagcgtgcgaaaagcgccctgtcgccttgaagcagcttgaggatatttgctttgaaattgaaaaagagcttagaaatcaaggcgtttctgaagtgaaaagcgacatgatcggagaaatggtgatggacaggcttgcgaaaatcgacgaagtcgcatatgtacggtttgcttcagtataccgccaatttaaagatattaacgtatttatcgacgagctgaaagatttaataaagaaagaacggtaaagagctgtaaattgatccagctcttttctcatgacaaaaacacagtcgtgtgacatgaaagcctgaaaaaggtgtaaaatgaggacaagaaacaaagtggaaggttgacaaaagatatgagtaattattggaaagatttgcttcctgtcgatccgtatgttgtcaaaagcagcggattgctgcaggacttggaccggcaaattgtcacgctattgtatcagcctttaatcggctctttttcgttcagcttgtttctcacgctgtggggagagctggagcaaaacagagtctggggaaaaagctcgactcacagacagctgatggcggcgatgcagaccagcctgaagacgattcactcagaaaaggaaaagcttgaggggatcggactgttgaaaacttatataaaagaaacggaacacgaacgtttgtttatatatgaattgattccgccgctcagaccggacgagttctttcaggacggcatgctgaatgtcttcttgtacaaccgcgtcggaaaggcgaggtttcagcagctgaaagaatatttttcccacccgtctgttcctgaagaagcacgggacatcacccgttctttcaatgaagtttttgcatctgtccagccgagcgaatggaagatgtccgacgatatgatcgaagcgatggagcttcgcgaagatcatgaatggatgaaagaagggaatagccaaccggcagcagtcacagacggcgcctttgactttcaactgtttctcgccggtttatctgacacgcttatcccgagaaaagcgctgacagaccaagtaaaggaaacgattaaaaagctggcctttctctacggtatcgaaccgcttcagatgcaaaacgtcgtcatgtcagccgttgacgaacacgatatgatcacgacagaggcgctcagaaaagcggcgagcgactggtatcagatcgagcgcggcggcccgcttccggaactcgtcgacaaagtgcagccgatgaatctccgcgaacagccgaatcaacagtcgtccacaaacgccaaggaagacaatttgatcgctttgcttgagcaagtatcgccaagaaagctgctgcaggatattggcggcggagcggaaccatccaaagccgatctgaaaattatagaagaaattatgcttgaccaaaaattagagcccggcgtcatcaatgttctgatttattatgtcatgctgaaaaccgatatgaagctttcgaaaaattacacgcaaaaaatcgcttcccactgggccagaaaaaaagttcgtacggttagagaggccatgaagcttgcgaaagaagaaaaccgccaatatcttgaatgggcggaagggaagaaaaagacttcccggaacaagaaagtcatcagagaagaaaagctgcctgattggcttcgggaaagtgacgatgctgacagcaaaccgctggaaacagagcaggctggtcctgcaaccagagaaggctttgaccagcagaaacagaagctgctcgaagaagtaaaaaaactgaaaaaccattccgctctttaatgtgaggtgacaagatgatggagccgattaaacgcgctttgcaaggcgtgacgacgagacccgattttaaaaaacgccttgaagatatgaaagaaaaagtgctctctgacaaggatgttcaggcgtttttaaacagccgccagtcagaagtggatcaaggaatgatcgacaggagccttaacaagctttatgaatatacacagcaaagcaaagcatgccaagactgcccgggtctgaaagaatgcaaaaacctgatacagggttatcatccaaagcttgtgctgaacggaaaaacaatcgatgttcaatacgataggtgtccggaaaaaaagaaagcggacgagagggaaagacagaggtcgctgattaaaagcatctatattcaacaggatcttctgaatgctacgtttgccgatattgacggagatgacccgagcagattgaaggtccttcagcttgtgacgggattcttgcatgactataacgaaacgggaaagggaaaaggcatttacgtctacgggaagttcggggtcggaaagacctttatgctggccgccattgcaaatgagcttgccgcaaaggatcatccgtccattctcgtctatgtccctgaatttgtcagggagctgaaaaatgcgatacatgatcagtcgcttgaggaaaagcttgatatggtcaagtctacgccgattctgatgctcgatgacatcggtgcggagtccatgtcaagctgggtgagggatgaggtgctcggcgccatccttcagcacagaatgtcccagcagctgccgacgtttttctcttcaaactttgatcctgatgaactgaaacaccatttcacctattcgcaaaggggagaaaaagaagaagtaaaagcggcaaggctgatggaaagggtgctgtatttagcgacgcctgtccggctggacgggaaaaaccggcgtcagtaatcatttgacaccgagcttcaatcacggagatgaagaagatgcgaaaaagaaccttggccaaatggacggtaatcgccgtaatcgcggcggccggactatggctgaatgcgaaatacctgaatctgagccctgctcatataagagaaggcgtcttatcctttgggattttcgccccgttgatctatatcggactattgatgatccggccgtttttgctgcttcctgcttccgttttcgccgtcagcggcggcctcgcattcggtccgctgtttggctctttgtattcttttatcggtgcggcaggcggtgcatttttatcattcgctcttgcatacaggctcggcggatactttcagcacatgccgctgaagctcgacagcctgcggacgcttttgcggaaaaacggctttttctgcattttgctcttgaggctggcgccgattcattttgacgcggtcagctatgcggcaggcgtttccaaagtgaagcctctgtcgtttgccctggcgacggccgcgggtatcataccgggcaccattattttaaacgtgctcgggtcaagcctcttgaccggcgacatcctagcgattgcggttacagccgcaatttacctgatattcattacagtgccgcttttgttcagaaaaaaagtgcaggcgctcctcgattaagggctcatccttttttacgtctattttatttgtcacccccatatacatgtaacagatgttgttaggggggacaaacatgcttgaaattacatttgaagatgattatgatacagccgcgtttttgcatctccttcgcaatgcggatgcgaatcggcatatcaggattcacgaagcgccagggaagatcggaattgaaaagacccattcctctgtcagtattcaggcctatattgagccggttctgacgagattttttacagaatgcaaagaagatgaatacatgctttcggtcattgaaggcgattattactttttggaccgggatgaacagcagcagattcttcaattggcccacagcattatggagggcgaacttgaagggcttcctctcaacaaggacgacacccctcgcgaacatttcatcattcaggagctccaagcgatctgtcttgaggaaaacgtcttttcgattcggtcatttatgacgtttcgccttgcgaagtattatgaacgcctcagatcttatgtggaggcggcgatcgacgagtataaaatggagcaggaatatcagacattcattcaatcgctgagagactacgtcatgtcgaaagagccgatgcttgaccatgtccacattgtgcacgacggttactttgtattgtgggaattaaagtatatttctgaacgggaacaaaaaaaatacatagacaggcggttcgtaagagaacacccaatgtatattgattcccatctcctggctccgctcgtatcgattgcgccggaaaaaatagacctctatacagaagaccgggaacacgccatggttcagaccattcaaaatatttttcaggagagggtgcggattcttccgcttggcgcctttcatccgcgggaaaacattttggaagagcattcttgattttgcgtgaaaaacaatttataatacggtataaacttaaagatatcatgtattgataaggacatgaaaagatgaacaccggtttgacagagagggagaccatggctgaaagtctcttatgccaaggatcatttttttaccgcctttgaacatcagttgtgaacggcaatttgtctagtaatgactgacgggacttcccgttacagaaccgaaagccgagagcgcgccgggttttttgcgttttcgggaaaaagggtggaaccacgaattccgtttattaatcctcgtccctttcttagggggacggggattttttattttgtaaaaaaaaggagtgactaggatgtcagatatggtaaaaatcaaatttcctgacggagcggttaaggagtttgcaaaagcgacgacaacagaagatatcgcggcatcaatcagtcccggcttaaagaaaaaagcgatagcggggaaattaaacggcaaagaaatcgatctgcgcgcaccgatccttgaggacggcgccatcgaaatcattacagaaggcagcgaagaagcgcttgaaatcatgcgccacagtactgcacacttaatggcccaggcgatcaagcgcctgtataaaaacgtgaagctcggggtcggcccggttatcgaaaacggcttctactacgacgtggatttggaagaagcgctgactccggaagaccttccgaagattgagaaggaaatgaaaaaaatcgtcggggaaaatctgccgatcgtaagaaaagaagtcagccgagaggaagccagagccctgtttgccgaaatcggcgatgatctgaaattggaactgcttgatgcgattccggaaggcgagacggtatcgatctatgagcagggcgaattcttcgatctgtgccgcggtgttcacgttccttcgacgggcaaaatcaaggagttcaagctgctgagccttgcgggggcatactggcgcggagacagcaacaacaagatgctccagcgcatctatgggacggctttcttcaaaaaagccgagcttgaagagcatcttcgcctccttgaggaagcgaaagaacgcgaccacagaaaactcggaaaagaactgaagctgttcgccaattcgcaaaaagtcggccagggtctgccactttggctgccaaagggtgcgaccatcagacgcgtcatcgagcgctatatcgttgacaaagagctcgcgctcggctatgagcacgtgtacacccctgtcctcggcagcaaagacctgtatgaaacatcaggccactgggatcattatcaagacggcatgttcccgccgatggagatggacaatgaaacacttgtgcttcgtccgatgaactgtccgcaccatatgatgatttataaaaacgacattcacagctaccgtgagcttccgatccggatcgccgagctcggaacgatgcaccgctatgaaatgtcaggggctctttcagggctgcagcgcgtccgcggaatgacgctgaatgacgcccacattttcgtccgtccagatcaaatcaaagacgagttcattcgaactgtccgcctgattcaggatgtatacgaagacttcggactggaagagtattcattccgcttgtcttaccgcgaccctgaagatacagagaaatactacgatgacgatgaaatgtggaacaaagcgcaatcgatgctgaaggaggcgatggacgagatcggccatgattattacgaagctgaaggggaagcggccttctacggaccgaagcttgacgttcaggtcaaaacagcaatcggcaaagaggaaactctgtcaactgttcagctggacttccttcttcctgaaaaattcgatctgacatatgtcggggaagacggaaaacctcatcgtccggtcgtcattcacagaggtgtcgtatcgacaatggaacgctttgtcgctttcttaattgaggagcataaaggcgcattgccgacatggcttgcccctgttcagttccaggtcatccctgtatcgccgtctgtgcatcttgactacgccaaaaaagttcaagagcgcctgcagcgtgaagggcttcgcgttgaagtcgatacccgcgacgagaaaatcggctataaaatccgtgaagcgcagatgcaaaaaatcccttacatgcttgtcgtcggcgaccaggaagttgaaaacgaagccgtcaacgtccgcaaatacggagagcaaaaatcagaaacggttgcaattgcagactttatcaaaaaagccgttgctgaagcaaagaaataaacaagaaaaaagcatgattcccgcccgggagtcatgcttttttgcttagcttgtccgctgcttgtccgcggaggatatcgaacagttcgcttaaatggctgatttcgtgatcaggtgcaacatcagtttcattctttttgcctttgcggttgacccagacggtttggatgcctgctctggaagccccgagaatgtcggtgttcaagttgtctccgaccatcacggcatcatcttttgtcatgccgaggagggtgaggcagtgttcaaatatgcttggatcaggctttccttttccgaattcaccggaaatcacgatttcattaaaataaggagcaagttccggtacgcctgccaacttttctttctgcaggctcggatcgccgtttgtcagcaaaagaagctctacttttcctttcagctcatctaaaacggcaaatgtttcttcataaacaaaagggctctttcggcgcactgccgcaaaatattcgccgagttcttccccgaaggcgggatcgtcgatgccaaacgccttcaatccgtttgtccatgcgtttcttctgtattcgggaacaattttgttcagtttttgaaacccttcgctgatcggctcgctgaagtttgaccacaggccttcaaatgggttgatgccgatcatgacggtgtatggatatgtttcataagacgtgtaaagctttcgcgctgcttcgcgcacggctgcttcaaattcttccgcatggattccgtatttttcttcagctttaaggcacgttttggaaaatgctgtactgacgcttttttcatcccagagcaatgtatcgtctaaatcaaaaaatacggctttcatcatcttctcctctgccattaatttatagaattctctcatttattttacaatagatcaaagggatgtgaaagaaatgatttaagaatgtgatgtaatgcagtatcaaagtatgaaagcttcttgaatatgataaaatgaaacgaaatctattgtttggaaaacgtttctaagatctatttgatgatggtgatgctggcccatgcgcgggaggaagaatcgttttatagttgaggagatggaaggaatggtattgtgaaaaaacgctgggtattttggtggatttgcaacatattgtggacggccgtttttgtaatcggagcagctgttgtttggctgagagatgttgatggcgctggtgttgctcaaacacctgaacttaaattaatagcatttatcgttttgttaattgcatttatatttccattcatcattcaagttgtgtggctgattgttaatttcaaagtgggaagcagcaaataagtaaacggcggcagacaattgctgccttttttattttgctcatgaagcggttttggccgttaaaaggttttaaagccatgccgtctcaaagagtgaataaagagaggtatgatagaataagagcagattccgattcagaaagaaagcaaggggaagtacatggtccaactcatgattatgatgctggagagagtggggatcatcgtcattctgggctttatgttggcccatatgaaggtgttccgtcagcacctacagcatccggaagggtataagggcaagggagttctcatctttattttttccttgttcagcatcatcagcaactatacaggcattgaaatccgggagcgcgagattttgaacaatgactggattttcgcaatcgacccgtcaagctcgattgccaatacgagaattctcggcgtcgaaatcggcggcttgatcggagggccgtttgtcggagcgggtgtcggactgctctcaggcattcaccgtttttcactgggagggacgacggctttgagctgcgcggtttcttcactgctggcaggtgtcattgcgggttatatcggcagctttttcaggaatcggcaccagatggtgacaccgcgggtagccgctcttgcgggcatttgtatggagggcctgcagatgcttatgattctcgtgcttgcaaaaccgcaggctgaggcacttgcgcttgttcagatgatcggcattccaatgacgattgtcaacgggacgggcagctttatttttctatcgatcattcagtctattatccgcaaagaggaacaggcgcgggccgttcagacccataaggtattttcgatagcggatcagacgcttccttttttccgccggggactgaatgaggattcctgcaaaagcgccgctctcattatacaccgcatgacagggacggatgccgtatcgattacggatagagagaacattctcgctcatgtcggagatggagcagatcatcatattccttcgaaaaatctgatcaccggtttatcgaaaaaagtcattcaaaccggaaaggtcatgaaagtgaagtcgcgcgatgaaatcgagtgtgcgcaccgttcctgtccgctgcaggcggcgatcgtactgccgctcttctccaaccgcgaaacaatcggcacgctgaagctgtacttcaagcacccgtccggtcttaaccgtgtgacggaagagctggccgaagggcttgccatgcttttttccactcagctagaactcggtgaggctgagctgcaaagcaagcttttgaaagatgccgaaatcaaggcgcttcaggcgcaggtcaatccgcactttttatttaatgccatccatacgatttctgctctgtgcaggacagatccggaaaaaacgcgaaaacttctcttgcagctgagcgtttattttcgttccaatctgcagggagccaggcagctgatgattccgctttcaaaagagctgaatcatctggaagcctatttatcattggagcaggcccgatttccgggcaagtatcatattgattttcatatcgaggacggccttgaaaatatggaaatccctccttttatcttgcagctgctcgttgaaaacgcgcttcgccatgcattcccgagaaaacaaaaggtatgcacggtaaaagtatgcgctgtgagagagcgggacggcgttttgatgaaggtgtcagacaacggcaggggaattaatccggagatgcttggacagctggggcaggcgcccgccccttcaaaggaaggaaatgggacggcgctttacaatgtgaaccagcggctcaccggtttgttcgggcaccaggctgctctgcagattgccagcgaacttgataaaggaacagagatatccttcaagattccttttcaaaccgaaagagaggggaacagagatgctcaaggtattaatcgtggatgatgaaatgtttgcgcgggacgagctgagatatttactagagcagactgaagaagtggatgcgattgacgaagctgaacatatcgaagaagcgtttgacaaaatggcggatcgcaaacccgatatcctctttttggacatcgatctgtcaggggagaacggttttgacattgcgcagcggctgaaaaaaatgtcggcgcctccggctgtcgtttttgcgaccgcttatgatgaatatgcgctgaaagcatttgaagtggatgcgattgattatttgacaaagccgtttgatgaggagcgaatcagacagacaatccacaaatataaaaggatgcgccccggcaaacaggaggagcggcagcttgcaggccaccacaggctggctctcagcattgacgaatcgatcgtcgtgctcgatcccgatgaaatcgtatacgccgggttagaaggcggacacgtcacagtgaagacttttgatcaggcatacacggttcacgatacattggttgtactcgaacaaaagctttcgcagacggcattgatcagggtgcacagaagttttctcgcaaatatggatcatattaaacaggtcaaaccctggttcaattcgacatacaacctcctgatgaaagacggctccacgatccctgtcagccgtacatacgcgaaagagctgaaaaaacggctgcatatggtgtgaaaaaatgatcagcggcggtgaagggcttaattcgtctttcaccgccgttttttagctaaaacatgcgctggagcccggggcgtcctgcttcaacggcgaacttggcataagttgaggctggagcgccgggacgtgtgatataaggaagaacctgaaagtcggcttcgagctgccggggcgtcaagcggcagcgaacatagccgcgctgtgcattgtacagtttgacatgcgggtttccgagccagatcggcgccaaagaatcggtctcgctgccgtcagcgtccgaagatatcgaagttgtgatcagctcggttccgattgtcgctgaccccgcatcatcgaagtccgcttttaagtcggcggcggcatgtctgtggatatcccctgtcagtacaacggggttttggatgccgtatgccttgtatgcggaaaaaagcctgtcgcggcaagcgggaaagccgtcccactggtctgtgctgtactcaactccaggacctgtgtcgcggtcgatttgagccagcacgacttgctggactaaaaagttccaaatcgtgtcagaccggctcaagccgtgaaaaagccagcgctcctggtcaaatccgagtatggagcgggatggctcaagccgttcagcctcatttgccggaaaattattgcggtactgccgggtgtccaaaacattgaattcagccaggtttccatagcggaaccgcctgtacatcagcatgtcaggcccctttggaatcgatgtgctgcggatcgggatattttcatagaaagcttgatacgccgctgcgcgctgccggagaaaatcgtccggagaagcattgtattgcgaatggatgccggcataattgttttcaacctcatggtcatccatcgtcacaacccagggagccagcgcatgaatggcctgaaggtccggatctgtcttaaaaagagaatatctgagtctgtattggctgagggtaacggtttttgcgttgtgggcagcggataaagtcacatcgcggaaaagatttttagcattaatggcatattcataaatatagtctccgaggaaaaaaacaacgtccggatggtcttcggccatatgccggtaagccgtaaaatacccgtggtaccaagcttggcacgaggcgagggcgaacgacatccccttgatgtcggcgtgcggggcaggcgcggtttttgtacggcctgtccggctgatttccctgcccgctttaaacctgtaccaataatagcttcccggctttaaaccgtgcacttcaacatgaacggagtgggcaagctcagcgagcgcagaggacgtcccgcgcttcaccactttgtgaaaatgttcatcttcagctacttcccactgaacagggacagctttgtcaggcattccccctaatccgtcttcggcaagcggatcggggccaagcctcgtccagatgacaaacccgtcgggatgcgggtctcctgaagccactccaagcttgaatggataatctgcaaatcggggcgcgcctgcggcgattgaagcgtcttcaggcatcaagccgcgccttgccaaagatgcaaattcgccagacggaacaaagcggcctcctcttgaatggtccatgggtcagggcctcctcatcaatttctcattaaccactatacgatcagcttagcttcattagcacattctggaatttaaataattgtgaagaatttgcaaagccggaagagtgatttgcatttcagcttcccatttctgcaattgaggggccgtatccggcaagttattttgaaaacgcttttttggggaggctctttttatataatgaacccaacacagccaaagaggtgaacgaaatgaagggtaaaaaagaatacggctttttaactcaggcatttatttttgctgttatgatgtttatttcaaacggaatcgccgcggttctgcccatcccgattcctccatctgtcatcggtttggtgctgttgtttgcattgctgtgtacgaaggtgctgaagcttgaacaagttgaatcgctcggcacggcgctcacttcgctgatcggctttttgttcgttccgtcgggaatatcagtgatgaattcgctcggcgtcatggagaaatacggattgccgatcgtcctcgtgattttcctggccaccgtcattctgcttgcagcgacaggattgttttcacagttcattctgtctgtcggcaaaaaggaccgtcaagacacacgagttgaaccagccaaaaaaacagcatcttgaatcaataggaggttctttacgctatgacaccttatttcggtatcgtcgtttcactggccgcatttggcaccggcacttttttatttaaaaaatcaaatggttttttcttattcacgcctctgtttgtcgcgatgattcttgggatcgcgtttttaaaaatcggcggtttttcatatgaggactacaagagcggcggagacatcattaagttctttttggagcccgccacaattgcgttcgccattcctttatataaacaggcggacaagttgaaaaagtattggctgcaaatccttggtgccattattgcaggctccgtctgctcggttgccgtcgtctatctgatcgcaaacgcgctccatcttgacggagccgtcatgaaaagcatgctgccccaggccgccacaacggcgattgctcttcctttatcaaaagggatcggcgggattcaagatattacggccttcgccgtcatctttaacgcagtgatcgtctatgcgctcggcgcgctttttttgaaaatcttcaaagtgcagcatccgatcgccaaagggttggcgctcggaacatcaggacatgccctcggcgtcgccgtcggaattgagatgggggaagtcgaagcggcaatggcgagtattgcagttgtcgtcgtcggcgtcgtgaccgtgtttgtcgttccgttatgtgttcaaatgatcggcggatagagcggctgaaagaaaaataaaaaaatagcattgctatttgaaatgtgtcctgatataatagcaaatgttgtgataaattttatatcttgacttgcaggatttgtttatgtaagatggataatgaattgaatatatatcaacaagcagaagcacccgcttctcacctgattgacacattcttgtagttggcaggttaaacgtacatttcttatttttctatgcaatgttcgcagtgtgggtgtttcgatgcccgcactttttgtttgcctgtggaatgcaaagaaacggtcaaaatgagttgtgaaatcaattcaaagattctatggaggtggctcattattagcaaagatcaattggttaatgagggtatccgtgcgcgtgaagttcgtttgatcggacaaaatggcgatcagcttgggatcaaatcccgccaggaagcactggaaattgcgggtcgcgcaaatcttgaccttgtgttggttgcagcgaatgcaaaaccgcctgtctgccggatcatggactatggaaagtacagattcgagcagcagaagaaggaaaaggaagcacgcaaaaatcaaaaaatcattaacttaaaagaagttcggctgagccctggtattgaagaacacgacttcaatacaaagcttcgcaacgccatcaagttcctgcaaaaaggggacaaagtgaaagcgtccatccgctttaaaggccgtgcgatcacgcataaagaaatcgggcagcgcgtgctggaccgtttttcagaagcctgcgcggaagtggcgactgttgaaacgaagccgaaaatggacggccgcagcatgttcctggtgctcgcgcctaaaactgaaaagtaattaaggaggaaacatccatgccaaaaatgaaaactcaccgcggatctgcgaaacgttttaaaaagacaggttccgggaaactgaaacgttctcatgcatatacaagtcacttgttcgcaaataaatctcaaaaacaaaagcgcaagcttcgcaaaagcgcagtcgtaagcgccggcgatttcaaacgcatcaagcagcagcttgccaacattaagtaatttcggaaaaggtataattaggagggaaatctaatgccaagagtaaaaggcggaactgttacacgcaaacgtcgtaaaaaggttctcaaattagcaaaaggttattttggttcaaaacatacattatataaagtagctaaccagcaggttatgaaatcaggaaactacgctttccgcgaccgtcgtcagaaaaagcgcgatttccgcaaactttggatcactcgtatcaatgctgcagcgcgcatgaacggtctttcttacagccgtttaatgcacggtcttaagctttccggtatcgaagtaaaccgcaaaatgcttgctgaccttgctgtaaacgatctgaacgcattcaatcagcttgcagacgctgctaaagcgcaattgaataaataattgaaaaaaggccgggctccggcctttttcttttgttcttcgagcaggatgtaaaacgattcggggaggccggccgcagcaggcgcccaaaccgaaaaacaaggggaaatgaacaattgactctcatatggatatacatgatcctcataaacggatacggttttttcttaatgaaagccgataagcaaaaagcggtcagaggcaaatggagggtgtctgagcgccgcatctggctcgttgcggctgcttttggctccgcaggcgtctggttcgggatgatgcggttcagacataagacaaaacacctttccttcaggctcggcattccttttttgctcggcgtgcaagctgttttgaccggcttttatatgatgaattaaaaaagcagacgaggctttattgctcttctgcttttttgtttttccacttttggatgttcgaatcccagtcgattttgcaatcgggatagtgctctttaatattttcttcaagttccgcgaagtcttcttccgtaaaagagctgagcttttcttcaggcgcttccgtccatacaaaaatcgtatggatgaacagcggatggtcttttgaaggaatgtgtttttctccttcgaaaagcacgcctttaaatgtcagcttgagatttttgcgtgtattcttttgttcgtccaaaacataaaagtgcttttttgcctgtgctgatttcagccttctgtccgggctccccaaaaattgaacggccctgtacacgacgtagaccaaaagcgccagcaaagccagtctcaatatgatgacaatcatgttaaaacagaacctcccttgaaagtaattttgagtatatcccaatatatacgaaccagttcccgcaaggtttcattttttaaccaaaaaagctgtaaacgatattggtcgtattgaaaagggatgtttctgtataatagtaaatgagggttaattaaggaggctgtatagagatggcaaagcttgatgaaacattgatgatgctaaaggaattaactgatgcaaaaggaattccggcgaatgaaaaagaacccagacaagtcatgaaatcgtacatagaaccgtttgccgacgaggttacgacagacagactgggaagcttaatcgcaaaaaagaccggacaggctgacggaccgaagattatgattgccggccatcttgatgaggtcggttttatggttacgcggatcgatgacaggggctatctccgctttcagacggtcggaggctggtggagccaggtcatgctggcgcagcgtgtgacggtcgtgacaaagaaaggcgacatcaccggtatcatcggttcaaagcctcctcatgtcctgtctcaggaggcgagaaaaaaatcggtcgatattaaagatatgtttatcgacatcggggcgtcgagcagggaggaagcgatggaatggggcgttcttccgggagaccaggtcgtcccttactttgaatttacggtgatgaataatgaaaaaatgctgcttgccaaagcatgggacaaccgtatcggctgcgcgatcgcaatcgacgtgctgaaaaacctgaaaggagccgatcatccgaatgtcgtctacggcgtcggaaccgtacaagaggaagtagggctgagaggcgcgaaaacagccgcgcatacgatcaagcctgatatcgctttcggtgtcgacgtgggaattgcgggtgatacgcctggtattaccgaaaaagagtcggcaagcaaaatgggaaaaggcccgcagatcatactttatgatgcatcaatggtgtcccataaagggcttcgcgactttgtaacgaatgtggcagatgaagccggcattccgtatcaatttgacgccctctcaggcggaggaacagattcaggatcaatccaccttaccgcgaacggagtgcctgccctgtcgatcacgatcgcgacgaggtatatccatacgcacgcggccatgcttcaccgggatgactatgaacatgcggtaaaattaattaccgaagtcattaaacgactggataaagagacggttcaaaacattacgtttgactgatgaaagagcaggctgacagcttatcttacaagctgtcagctttttttgttttttggaatgttaaagacagcgcttacatatataaacattgttcgaaaaattgacaaagaaagggaggcattgtttttttcattacaagaacaggagtgtgagctgaatgaaaaatgtgttgcggaaaatgtctttggcggccttgatattcggactgctgctgtctttttcgatgcctgaatcaggcaaagcggcgttttgggacacaaaaggggacaatttcatccatgacccttctatcattaaagagggaaatacatggtatacatttggaacagggctcggcacagggctgcgtgtcattaagtcaacagacgggagaaactggagtgctgccccgagtatttttccaactccattgtcatggtggaagatgtacgtaccaaatcatgaaccgcatcaatgggcaccggatatcagctactataacggccggtattggctgtactactcggtttcgtctttcggttcaaacacatcagcgatagggctcgcatcgacagaccggatttcatccggccaatggcgggatgacgggctggtcatcaggtcgacatccggcgatcagtttaatgccattgaccctgatctggtcattgacaaagacggaaacccctggctctcattcggttccttctggagcggcattaagctgacaaggcttgataaaaacacgatgaaaccgacgggaagcctgtattcgatcgcctcaaggccgaataacggaggagcggttgaagccccgaacattacctacaaagacggctactattacttatttgtctcgtttgacagctgctgcaaaggggtggacagcacatataaaatagcctatggccgttcaacgagcattacgggaccctattatgataaaagcggcaaaaatatgatgaacggcggagggacgatcctggactccggcaatgaccgctggaaagggccgggacatcaggatgttctgaacaactcgatccttgtcaggcatgcttacgacgcgctggacaatggtgtatcaaagctgctcatcaatgacttgtactgggattcccaagggtggccgacttattaacagcagatgacgggcggtttccgcccggtttttttgttctgaaatctgtcaaaaaaaataaaaaacataccggaaattaaattgacagtttttttcataatgatataatgaagttgttcgtacaaatatgtttttgatgttagttgtacgtacatataatcgcgatacagtttgagatcaaggtatgatttatgtttttttgtaagcgttttaatagtttgctattctacacagacaccataaagacgaggaggaggaagctatttgattcaggcaaagacgcatgtgttttggtttgtgacaggcagccagcatttatatggcgaagaggcggtacaagaggtagaagagcattccaaaatgatctgcaacggattaaatgacggagatttaaggtttcaagtcgagtacaaagcggtggccacttcgctggacggcgtcagaaaactgtttgaagaggcgaaccgggacgaagagtgcgcaggcatcatcacctggatgcatacgttttcaccggccaaaatgtggattcccggcctttccgagctgaataagccgctgctccattttcatacccagtttaaccgggacattccgtgggataaaatcgacatggatttcatgaatattaatcagtctgcccacggcgaccgcgaatacggttttatcggagcgagattgggcattcctcgaaaagtaatcgccggatattgggaagacagagaagtaaagcgctcgatcgacaaatggatgagcgcagcggtcgcatatattgaaagccgccatatcaaagtcgcccgatttggggacaacatgcggaatgtggcggtaacagaaggagataagattgaagcgcagattcagcttggctggtctgtcgacggatatggaatcggcgatctcgtcacggagatcaatgctgtatcagaacagagtctaagcgagctcatctccgaatatgaggagctttatgagtggccggaaggcgaagcggcaagggaatccgtcaaggagcaggcgcggattgagcttggattaaagcgctttctttcgagcggaggctatacggcctttacgacaacctttgaagacctccacggcatgaagcagcttccgggtttggctgttcagcggctgatggctgaaggctatggcttcggaggagaaggagattggaaaacggctgcgcttgtcaggatgatgaaaatgatggccggcggaaaagaaacgtcatttatggaggattacacgtaccattttgaaccgggcaatgaaatgatcctcggctcccacatgcttgaagtgtgcccttcgattgccgaacacaaaccgagaattgaagtccatccgctgtcaatgggtgcaaaggatgatccggcgcggctcgtgtttgacggaattgcaggtcctgcggtcaatgtctcccttattgatttgggcggacgtttcaggcttgtcatcaataaagtggaagctgtgaaggttccgcatgatatgccgaatcttccggtggcgcgcgtactttggaagcctcagccgtctctgagaacatcggctgaagcgtggattttggctggcggtgctcaccatacatgcctttcgtaccagctgacagccgagcagatgctcgattgggccgaaatgtcgggcattgaagcggtgttgatcaatcgtgatacaacgattttaaatcttcgcaatgaactcaaatggagtgaagctgcatatcggcttcgcaagttttaagggggtgaggacttatcccttacacaatcggagttgactttggaacattgtcagggcgtgcagttctcgtcgatgtccggacaggtgaggaaatcgcgacagctgtcaaagagtacacgcacggggtgatagaccgggagcttccggtctcaaagcgaaagcttccgagagactgggcgctccagcatccggccgattacattgaagtgctggaggaaacgattccgagccttttgaaacagtcaaaagcggatccgaaagaaatcatcggaatcggaatcgatttcacggcttgcacgattttgcccgttgacgagaacgggactcctctttgtatgagggaagagtatgcgtcggaaccgcacagctatgtgaagctttggaagcaccatgctgcacaggagcaggcgaatcgcttaaatcaaatcgcggaagaaagaaatgaaccttttcttcaaacatacggcgggaaaatttcttccgagtggctcgttccaaaagtgatgcaaatcgcggaagaagcgcctgacatttatgatgccgcagccgagatcatggaagcggccgactggatcgtctatatgctgtgcggaaccagaaagcgcaacaattgcacagcgggttataaagcgatttggaacaataagagcggctatccttccgacgatttcttcgcaagcctgcatccgaagctgaaaaatatcgttcgggaaaaactaacggaggatatttattctgtaggcgaaaaagcgggcggactgactgaagaaatggccgggaagacagggcttctggcaggtacggcggtcgctgtcgcaaatgttgatgctcatgtgtcggttccggcggtcggcatcacagagccgggcaagatgctgatgatcatgggaacgtctacctgtcatatgctgctcggcgaggatgtcaggatggtgccgggaatgtgcggcgtcgttgaagacgggattctgccgggctatgtcggctatgaagcgggccaatcgtgcgttggcgaccattttcattggctgattcaacactttgttccagaagcgtatttgaaagaagctgaagccgaagggatttccatttacgaactgctgtctcaaaaggccggcagtctccaaatcggtgaaagcggtttgcttgcattggattggtggaacggaaaccgttcaacactcgttgatgccgatctgacgggaatgctgctcggtatgacccttgccactaagcctgaagagatataccgtgcattggttgaagcgactgcctacgggacgaggatcattattgaaacgttcagacaaagcggcgtgccgatcgaggagctgtatgccgcaggaggaatcgccgaaaaaaatccgtttatcatgcaggtttacgcggatgtcaccaacatggaaatcaaaatttccggatctccgcaggcgccggctttaggttcagcgatattcggagcgctcgcggccggaagcatgaacggcggttacgaccatatcgaagaagcagtcgcacatatgggcaagatcaaggataaaacgtacaaaccaattcctgaaaacgtttccttatacgatcagctttatgcggaatataaggagctttacacgtacttcggaaagcaaaacaatgtgatgaaacgccttaaaaaattgaaaaacatccagtcccttagttctgacaccggtaaagcgatggcttagagggaggagaaaactgtgctggaatctttgaaagaacaagcattaaaagcgaatttgcagcttgaagaataccggcttgtcacctttacatggggaaatgtcagcggtattgaccgggagaataagctggtcgtcatcaagccgagcggtgtcaaatacagcgatttgaaagccgaagatttagtggttctgaatatggacggcgagattgtggaaggggatctgaagccatcttccgatacgccgacacacctctatctttaccggcagtttcaatcgatcggcgggatcgtccatacgcattccccgtgggcgacaagctgggctcagtcagggaaggacattccgtcgctcggaacgactcatgccgactactaccacggcgacattccgtgtacacgggaaatggatcccgatgaaatcaggagtcaatacgagctgaatacaggaaaagtgattgtagagacgttccggcatcttgaccccctggcggtgcccgccgttctcgtgaacaatcacgggccgttttgctggggaaaagacgccttaactgccgtacacaatgccgtcgtcctagaagaagtcgccaagatggcgtaccgctccctgatgctgaatccgtctcttaagcggattaagagcgctttgcaggataagcattattttcgaaagcacggggcagacgcctattacggccaatagaggagggaagctgccaatgaatgacttgatctcttatgtgaaaaaaactttgggcgcatgcgaatgcggaaccgtccaccacccgcttacagtcgaaaaaatcgcgatcggcgacaatgctgttgagcaagagctgcccgctttcgtgaaatcggcttcctataaaaaagccgctgtcatttatgatgaaacgaccggacggttagccggcaagcggattgcctctcttcttgaggaaacggctgaaacggttccggtgctgctggaagataatgaagcgggcgatgtgacggcggatgagcaaacattggtgagtgcattgatcggtgtaccgattgatgcggatgtactaattgcggccggagcgggcacgattcacgacatcgtcaggttttgcgcctatcagcgcggcattccgtttatttcagttcctacggctccgtcggttgacggttttacttcagccggcgcaccgctgattttaaaaggaaagaaacagacggttcaaacgacagcgccgatcgcgctttttgccgatttggagctcttgtgtcaagcgccgcagaacatggtagccgcaggttttggcgatatgctcggcaaggtgacgtcgcttgcggattgggagatttcccgcttgcttgccggcgagccgtattgtccggccgccagccggctcacgagggaagcgcttgatcaatgtcttgaccgaaaagacgacatcgccgccaagatgcgggatgggattgagaaattgatggaatcgctgatcctttctggcctagtcatgctggttctcgaccattcaaggccggcttccggcggcgagcaccatctttcccactaccttgaaatgaaagcgctggagaacaataagcggcaagtgctccacggtgctaaagtcggctgcagcgcgattatgctgactgacatttaccgatctcttatcggtgcaagcctgggtgatcaacacgctgagcaagcgattcgctccgtttatgaaaagctccctgacggtaagaaaatggcagagtggatgaggcgtatcggcgggcctgtatcattcaaagaactcgatgttgaagaagagctggtgagagaagcgctcgcatacgcccatcagctcagagaccggtatacgggactgaaaatcatcaatcaatacggccttttgccggggcttttaggcaaaggaccaggcgtgaaaggggttaaaatgtgaaaaggttcctttcatctatctttatggtcacggtcgctgtatgtttgcttttatcggggtgcaaggcgagtcctgcctccgatcaagccgatcaagcggacggcaccgaactgacattttggacattcaacggccttcatgaacagttttatgctgagatggtgaaagaatggaacaaaaagtatcccgagcgaaaaatcaaattaaatacagtggtgtatccgtatggacagatgcatgacaatttatctatctcgcttttagccgggaaaggggttccagatattgccgatgttgagctggggcgctattcgaactttttgaagggctctgacattcctcttaccgatttaacgccgcttgtggaggacgaacgcgacaagtttgttgaagcgaggctgacgctctacagcaagaacggcaagctttacggacttgacacacatgtcggaacaaccgtgatgtattacaacatggaaatgatgaataaagcaggcgttgatccggacgacatcaaaacatgggaagattacagggaagcgggcaaaaaggtcgtcaaagctctcggaaagccgatgacgacgattgaaacgaccgacccgaattcatttctgccgctggtttcccagcagggatccggttactttgatgagcaggggcggttgacattaaacaatgagacaaacgtgaaaacgctcgaatttttaaagactttaattgagaaagacaaaattgccgtcacaacgcccggaggcaatcatcacagtgaagagtattacggatttatgaaccaaggcggcgcggcgtctgtcttaatgccgatctggtatatgggccgttttttggattatatgcctgacttgaaagggaaaatcgcgatcagaccgctgccggcatgggaagaagggggagaccgctcagcgggaatgggcggaacggccaccgtgattccaaaacaggcgaaacaggtcgatctggccaaggatttcttgaaatttgccaaagcgtcaaaagaaggcaacatcaagctgtggaccgtgctcgggttcgatccgctcagatgggatgtgtgggactcggacgaattgaaaaaaccaaatcaatatacagaatactttcaaaacggacaacacatcttttccgtgcttcttgacataaaggatgagatcaatccgctttaccttactgaggattatgcgaagacttccgatctcgtcaacagaaacatactgtacgaagcgctcaaaacgaagagcaaaacaccgaaagaagcattggacaaagcagcagctgaagtgaaagggcaatagtctttcattactgtaaagcgaggcgataacttgaagactgttaaaacagatacagtgcattcgtttccgccggtgagcagaaaaagaaagatcagacgtttattatattcagcaaaagccgcaccctacatttttacagcaccttttgtactctccttttgcatattttttctttatccgcttatcagcgtcgtcatcatgagttttcaaagcattctccccggggaagtccgcttcatcgggacggagaactataaagcattaaacaatcctacattttataccgcactattcaacaccgtaaaatacaccttttggacattgctgattttaatacctgttcctcttattctggcagtctttttagattctaaactcgtaaaggttaaaaacgtgttcaaatcggctttattcatcccggctctgacttcaaccattgtggcggggattattttcaggctgatttttggagaaatggatacatccctggcgaattcgatattggctaagctcggaggttcgccgtacaactggctgaacaatgaacataccggcatgtttttaatggtgatgctcgcatcttggagatggatggggatcaatgtcctgtactttttggcgggcttgcagaacgttccgaaagaattgtatgaagctgccgaaatcgacggggcaggcacgttcaagaagttttaccatattacgcttccgtttttaaagcccgtcagcgtctacgtgctgacgatcagcatcatcggcggcttccggatgtttgaagaaagctacgtgctgtggcagaacaactctccgggcaacatcggcctgacgatggtcggatacatttatcagcaggggcttgcctacaacaacatgggctacggatcggcgctcggcatcgtgctcttgatcatcattttcatctgcagcctcatttcattaaagctgtctggatcttttaaaaaggagggctattaatgcgtcctgccggaggcctcaacattgcgaaagcagctctgtttctgctgtttgcgatattaagctttttgtttgtgtttccgctcttctgccttgtactcggctcgctcaagccatcttcggaattgctgcgcttcggcctgaatttaaagctgagccctgaaatcctgagccttgacaattacacttacttgtttaacggaggcagcatttattttcaatggttttcgaacagcttgattctcgtggtgatatccaccgtgctgacgctcttgttttcttcaatggtcggatacgggcttgccgtctacgactttaaaggaaaaaatctcttgttcgtagccgtgctcctgatcatgatggtgccgatcgaaattctcatgctgcctttatttaaaatgacggtttctcttcatattgtcgacacatacgccggtgtgatcctgccgtttatcgtctcgcctgtagccgtgtttttcttcagacagtatgcgctcggcctgccgagagatttgcttgattccgcgagaatggacggctgcacagagttcggcatttacttcaggatcatggcgcccttgatgaagccggcatttggagcgatgatcattcttcaatccttaaacagctggaacaacttcttatggccgctgatcgttttgcgatcgaaagaaatgtttacgctcccaatcggactgtccgctttgctcagtccgtacgggaacaattatgacatgttgatttcgggttctgtgctggcgattctgcccgtgattctcatcttcctgttcttccagaagtactttatatcaggtttgacggcgggcggaatcaaaggctgatccactatatatcatcttgaaaggaatgatttaacatgactgtacacaaagcgaagatgacgattgacaaggaatataaggtggcagagattgataagcgaatttacggctcctttatcgagcatctcggcagagccgtttatgaaggcatttatgagcctgatcatcctgaagctgacgaatcaggctttcggaaagatgtcattaaactagtcagagaactaaaggtgccgtttatcaggtatcccggcggaaactttgtatctggatataactgggaggatggagtcggacctgtcgaacagcggccgacaagacttgatttggcgtgggcgacaaccgagccgaacttaatcggtacgaacgaatttatggattgggcaaagcttgtcggggcagaggtgaatatggccgtcaacctcggaacgagaggaattgatgccgcacgcaacctagtagaatattgcaaccatccgtcaggatcgtactacagcgacttgagaaaatcccacggatataaggaaccgcataaaattaaaacatggtgcctcggcaatgaaatggacggtccatggcaaatcggccataaaacagcggccgaatacggaagacttgccgctgaagccgcgaaggtgatgaaatggacggacccgtcgatcgagcttgtcgcctgcggaagttcgggaagcggaatgccgacattcatcgactgggaaacgaccgtgcttgaccatacgtacgaacacgtcgagtacatctcgcttcactcgtattacggcaaccgcgacaatgatcttccaaactatttggcgagatcgctagacatggatcactttatcaaaacggtcatctcagtctgcgactatatgaaagcgaaaaagaaaagcaagaaaacgattcacctttcatatgatgagtggaatgtctggtatcactcgaatgaaaaagacaaagaagctgaacgctgggcgaaagcgccgcaccttcttgaagacatctacaactttgaggatgcgcttctcgtcggctgtatgctgattacgatgctcaagcatgccgaccgcgtgaaaatcgcctgtctggctcagcttgtcaatgtcatcgcgccgattatgacagacaaagggggagaagcatggcgtcagaccattttctatccgtttatgcacgcttccgtctacggcagaggaacggtactgcagacggcggtatcgtctccaaagtatgatgcgaaagactttacggatgtgccgtacttggagtccgtgtctgttttcaatgaagaagccgaggaattaaccgtttttgccgtcaaccgcgcaacagacgccggccttgaaatggaagccgatatgagaagctttgaagggtacagtgtctctgagcacatcgttctggaacacgaagatcataaagcgacgaatgaaaaagaccgcaacaacgtcgttccgcacagcggcggagacgccaaagtatgtgacggcaggctgacggctcaccttccgaagctttcctggaatgtgatcagaatgaagaaacaatgattgaaaaaccggcccgaagaggccggttttttcagatgaaaaaaaggcttcagcaaatatgccgaagaataagttaaaacgggaagaggatttatgaagacgtttttttcggctgcgtactgttttttgatgtacgcatttttagcatacctttggcttctgtttatcacggcgatccttgaccggccccggtttcttaatcactcacttttagaggcgggcgtcatcttgatcggcaccattttgtttttttcgctgtcccaccatttctcagcttcgcttgtcaaaacaaatgtcaatcgaatcgcggggaccgccgctttttgtctagtgatggccgttcatttttttatcgttccgttatgctgacagaaaaaaggcggatatccgatgatacccgccaattacgccttaaaaaaggcagcagatgaagcttgtgtctattttattcttattattcctattagtcaactatgttttaattatcgggactgaaaaaacgcacaaaagatgattgcgcttacaaaaaatatgagctatgttaaaaaagagacaaagggggggaggaattggatgaatgcaataacaattgtgatcgcttccatctgtattttggcgatcgcctatcgtttgtacggaacatttatgatggtgaaagtgttgaaggttgatgacgacaagccgactcctgcccatcttcagaaagacggcaaagattatgtgccgacgaacaaatgggtgtctttcggccaccactttgcggccatcgcagccgcggggccgcttgtcgggccgatcttggcggcgcagttcggctacttgccggggctgttgtggctcctgatcggagcggtcatcgggggcgccgtgcatgatattgttgttttatttgcgtcgatgcggaggaagggaaagtcgctttcagaagtggcgaaagaagagctcgggcctgttgcgggattttgcacggggcttgcgatgctgtttattattacaatcacgatggcggggctgtcgatggttgtgcttcatgcgcttgaacgcaatccgtgggggacgttcgccgttgcgattacaattccgatcgcgatgggggtcggcttattttataaaaagacaggcaacttaaaattagcgtctaccggcggatttattttgctgatggccggtgtcttcatcgggccctccattgcagagacgccgcttggagacgccttgacgctcgatacgaaaacgcttgctgtcgcacttcctgtctatgcattttttgcagcggcgctgcctgtatggctgctgctcgcaccgcgcgattatttgagcagctttatgaaaatcggggtgtttatcgctttgattgccggggttttcgttgtcaatccggcgattccgtttccggcgtttaccgagttcacgggcggagggggacctgtttcgcctggtccggtctggccgttcatttcaattacgatcgcctgcggtgcgatttccggtttccatgcgtttgtcggttcaggcacgacgccgaagatgcttgacaagtggagcgacatgaaattcgtcggcttcggagcgatgctcgttgagtgtcttgtcggcatcatggctttaatcgcggcaacggcgttgcagccgggcgattattttgccatcaacagttcgccagaagtctttcggacgcttggcatgaatgtcgtccatctgcctgaactcagccgcgaaatcggtctcgatcttgaaggaagaacaggcggagctgttacccttgccgtcggcatggcttatattttcacggatattccgtttttcagccatttggcctcttactttttccaatttgtcatcatgtttgaagctgtctttattttaacggcgatcgatgccggtacaagggtggcgcgttatttgattcaagactttttcggggaagtgtacaaaccgctgaaaaaaacggactggcttccgggttcggtcgcagcgagcgcccttgcctgtttcatgtggggatatttgctgtactcaggcgatatcagctcgatttgggcgctgtttggcgtatccaaccagctgatggcatccgtcggtttaattatcggagcgacggtcattttaaaaattgcggacaaacggcgttatatgctgacatgtctcattccgctcgcttatttgtatgtgacggtcaactatgcgggatactggatgatcaaaaacgtttattttaatgcggaagctgccggtttcagcgttttaaacggcattttatcgatcattatgcttgtgttgggacttgtgatcatggctgcagccattaaaaaatggacggagatttggcgcgatccggcattgcggatggagccttctatacctggatgatcaaataaaccggggccgtttggccgccggtttatttcgcttttaatccttgttccaatgtctcgagcatttcggttttgtctgattcagttgcgtgctgccagatgacctcgaacaacacacccaatcccggaagcattttttcttcaccgctttggatcgcatcgacgatcgtatgttcaagctcttcttgcgagttccctgatacattggcaataacggcatggcgcaaattcaaatccatcatttttcactccatttcatcatctgtttttctatattctgcctcgctttcgggtttattatgtatcattgatgagatataatgtgactattgcgagacaaaaggagtcaaaacgatttgaaacgaattgaatcagccaaaaatcaaaaagtgaaggactggaaaaaacttcatgcaaaaaaagagcggacaaaaacgaatactttcttaatagaaggcgagcatctcgttgaggaagcgctgaagacaccgggtgttgtgaaagaaatcatggtcgcagacgaagcggacttcccggctatgattgatgagtctgttgcccgctatgttttgagcgccgatgctttttcagcgattgccgaaacggagacacctcaggcggtcgccgctgtatgccgaatgcccgaaagcggaccttttcaatacgaaaagctgctgctagctgatgctgtgcaggacccgggcaatttagggacgatcatccggacggcagacgcggcggggatcgatgccgttgttatcggacaagggactgtcgacccttacaatgccaaaacgctcaggtcggctcaaggctcgcattttcacatcccgattttaaaacgcgagctttcagagctgattgaagagctgaagggaaaaagcgtcccggtttacggcacagcgctgcagggtgccgtgccatttagagaagcggagccgtcgcagtcgtttgcgctattgatcggaaacgaaggatctggggtcgatccggccctcctcgcacagaccgaccaaaatctgtacgttccgatctacggaaaagcggagtcgctcaatgtggcggccgcagccgcggtccttctttatcatctccgcggataaccggttgcacaggatcatgtaattcactataatgaatttaatatgtttaaaaacagtgatagaggctccgttttttcacatgccgccattcagggagaaaatgcctgagactgcaagcatttttatggcaggccggaaaaacgcttcacctcttgagttgtcaccgggaccacgtccctcgagggatgtgtaaaggtgaaccggatttattccgttatgccaatgaagtaagcagcaaagcttttttgctttgttttaaaaaagggtggtaccacggccacgattcgtccctttcattataaaaggggctttttttattgcctaaaaaacaggttgctacataaaaggaggagtttttaagatgcaggaagagctgaaacggcttgaaaaagaagcggttgaaaaagtggaagccgctggttcattaaaagaagtcaacgatgtccgcgttgcgtatctgggaaaaaagggaccgatcacagaagtgcttcggggaatgggaaagctgtccgctgaagaaaggccgaaaatgggggccttggcgaacgaagtaagagagaaaatcgccgcggcgatcgccgaaaaaaatgcccgccttgaggaagaagaggtgaaaaggaagctgaaagagcagacgattgacgtgacgcttccgggaagccctgtgaaaacaggagcgcggcatccgctgacgatcgttattgaagaaatcgaagacttgtttatcagcatgggatattcggtggaagaggggcctgaagtggaaaccgactattataacttcgaagcgctcaaccttccgaaagagcacccggcccgggatatgcaagacagcttttatattacggaagatacgctgatgagaacacagacatctcctgttcagacgcgcacgatggaaaaacataaaggcaaaggccctgtcaaaatcatctgccccggcaaagtgtaccgccgcgacaacgatgatgcgacacattcccatcagtttatgcagattgaagggctctgcgttgaccgtgatatcagcatgagcgacttaaaaggaaccctggaaacggtcgcgaaaaagatgttcggcgaagagcgcgaaatcagactgcgtccaagcttcttcccgtttacagagccgtctgtcgaagtcgatgtttcctgctttaaatgcggaggcaaaggctgctccgtttgtaaacaaacgggctggatcgaaattctcggcgccggaatggtgcatccgaacgtgctcgaaatggccggattctattccaaacaatatcagggatttgcttttgggatgggcgttgaacggatcgcaatgctgaagtacggcattgacgacattcgtcatttctatacgaacgatgtcagatttttatctcaatttaaacaagcttaaagaggaggacgcgtgatgtttgtttcatataaatggctgcaagaatacgtgaatttagacgagatgactcccgagattctcgctgaaaagattacaagaagcggaattgaagtggaaggcatcgaatataagggagaaggaattaaaggtgttgtcattggacatgtgctggagcgcgaacagcatccgaacgccgacaaattaaacaaatgcctcgtcgatatcggcgaagaagagcctgtccagatcatctgcggggctccgaatgtagacaaagggcaaaaagtagccgtcgccacggttggcgcggtattgcccggcaattttaaaatcaaaaaggctaagctccgcggggaagcgtctaacggcatgatctgctctttgcaggagcttggcattcaaggcaagcttgtgccgaaagaatatgcggaaggcatcttcgttttcccgggcgatgctgaaaccggtgcggacgcccttcaaagcctggcgctcgacgatgcagttctcgaactgggactgacgccaaaccgcgccgacgccatgaacatgctcggtgttgcctatgaagtggctgcgattctcggccgcgaagtcaagctccctgagacggcttatcaggcaggcgccgaaaaagcggcggactatatttccgtcaaaattgaagatacagaagccaatcctttatacgcggcgaaaatcattaaagacgtcaaaatcggcccgtcgccgctttggatgcagacgaagctgatcaacgccggcatcagaccgcacaacaatgtcgtcgacattacgaactttgtgctgctcgaatacggccagccgctccacgcgtttgattatgaccgcttcggctcaaaagaggtcgtcatccgcaaagcgtacgagaacgaaacgataacgacgctcgacgaacaagaaagaacgctgacccctgagcaccttgtcatcacaaacggctcttctccgcaggctgtcgcaggcgtaatgggcggagcggaatcagaagtccgcgaagatacggcgacagtgctgctggaagcggcgtatttcaacggccagaccgttcgcaaagcatcaaaggacctaggtcttcgcagcgaatcaagcgtccgctttgaaaaaggcatcgatcctgcacgggtgcgcctcgctgcagaacgcgcggcagatttgatcagccggtatgccggaggaaccatcttggaaggtacggtcgaagaaaaccatcttgacatcaaagagaatgtcatccgcctttccgttgataaagtgacgaaggttctcggcatgtccatcagcaaagaagaaatggtcaacatttttgaaaggctcggctttgcagttgaagacgctgaacgtgaactggtcgtgacggttccgtcaagaagaggcgatattgcgattgaagaagatttgatcgaagaggtcgcaagactgtacggatatgacaacattccgtcgacactgccggaagtaacaggctttgcgggcggactgacaccttatcaggacaagcgcagaaaagtaagacgcttcctggaaggagcagggctttcccaggcgatcacatactcattaacaaacgataaaaaagcgacggcttacgcattggaaaaatcgtttaaaacgatcctttcactgccgatgagcgaggaaagaagcgtgctgaggcacagcctgctccctaatctgctcgattcggttgcatacaacttggcaaggcaggccgattcagctgctttttatgaaatcggttctgttttcttgaaagccgaagaacatacgaaaccggtcgaaaaagaacacgtcgccggagccgtgacaggcctgtggcacaaaaacctctggcagggcgagaaaaagccggttgatttcttcgtcgtaaaaggcatcgtcgaaggtctgttggaaaagctcggaatcaccgaaggcatcgaattcgctcaatctgaaagaaaagagcttcatcctgggcggacagccaatattttgcacaacggctcattagtcggcttcatcggccagctgcatccgtcagttgaaaaagagctggacctgagcgacacgtatgtgtttgaactggacctgcacgagctcctccgattggatgtaccggagatcacgtatacaccaattccgaagtatccttctgttacaagggacatcgcgcttgttgtagacaaacaaacaacggccggccagcttgaggacgtcatcaaaacagcaggcggcaaatggctgaaagaagtccatgtctttgacgtctatgaaggcgagcacatggaagaaggcaagaagtccgtcgccttcagcctgcaatatttgaatcctgaacagacattgacagaagaagaagtgacaaaagtccacgaccaagtgctgaaagcgctggaagataaatatcaggctgtattgagaggataaagaaaaaccggtccccgatcatttgggaaccggtttttttgcattggaaaaattgtcggcctattgtaagttttaattattttaggatggcaagaatatttatgtaaaatattttgaattaagttgtatcgaattctcatatgttatttaatgagtctatacgaaggtaatctatgcaagaatatcggagaaaatagatatggcaatagaaaataaaaacaatatgaaaaaagaaaaagagtatttaatttttagtgagttttctttcttttctagacataaatagcaccaaaaaaataacgaaattaaagaaaaaatgtttaaatttcttaaaaaaggaatagaaaaaagactttcagcatcttttaagccaaatagataaaagacaataactaagacactgcctacaagattgaaatagtaggaaagaacaccttttgaaaaaatgtttttaaaggaatcctttgctccaaaaatcataatagcgagccaaatgattaaagtgaaaaataaaagctcaagaaggggttttatcgcttcgccaattactgctattgtaatgccaatccatttactgatagtaataagatttccatattcatcttcgtttaattcatgtaagctagcatcgatctcattcatttttaaaatggaaacacataaggctgcagctccagataatagacaaatacatattaagttgaatttagtcttcttcatattgaactccttattttagtaatattacgtagtattcgacaatagatgctaagattagaaggcctactgcacttatcattattattgtgtactcttttactttcggcttaatcattaggtttatttcagacttttttagaaatcttaaaaaacgggaagaaatatcaagagatattacataaaaagcaagaagggcaaggatttcaaaggggccgtgaaataagagatattgtagtgatttccaaaaacctaaagacttctcatatgaaaagaaaattgcccctgagaaataaccgtttaaaaacactactacactagataggaaaccaacactgattaatccaagaaagaaaatagttagtcctacaattaagttatttgtaaaaatctctaaagcgttggatattttaaagctatcatagtaagtctcgtgtatttcttgaaatacaaaaaagctaagagaaaaaccgaaaccaaaaataataatgaacaaaatagagtatttagcataggtattcaaggaattttttttcaaggctggcttcattaaatgtctccccggctaattttttttcagtgtggataatatttccgttattaataaataatatctcatcacaaagatctgctgcaaactgtaagatatgcgtggataaaataataattctattttgatttctaatattaattaaaatctttttcatatccgccatgttttttggatcaagtcctgtaaaaggctcatcaagcaagataacatcaggttgatgcaaagtggaaagaataaaagacattctttgacgcattcctcttgatagcgaagatgccatttggtctttttgttcttttagactgaacatgtctaaggtttcaatgatttgttcttgggataatggtttttcaattaataaagattggtacttgattaattcataacacgttaaattctcaaataattttggatcgtcttctaggtatccgattttctctaaataattggtaagatgtccatcaacgactacctcaccgctatccggaggaatgaggcctgcaataatttctaatagggtcgtttttcctgctccgtttttaccgagcaatccaataatctgatttcgcccgcaagtgaattctaaattcttcatgctaaaattggattgaggatattcttttgatatattttgcagtttaagcatataatcactcactcgaataaagattttattgatatgtaatttttgttgattgttgatttccatatttgcttgtttatggagtgcagtagcgttatgatacataacaaagtgataaaaataacaacatacaaaactttgttgtaagttgaaacaatggctaaccctattagtaatccaaatactaaattaagaaagattttgcttaaagtactgggaacttgataaatgtaatcccatttaaaatatggaaacaatatagttgaagtgagacagcttaaccccaaagtaacagctatcatcaataagataatggataatgcaataaaatgatccggttttatataaaaatttgaaatcgcagcatagattaaaacaaataacacatgtgctaagacagagattttggtttttgcttttattttgtttttaataaagtttggcttgtgctgattcaaaggtataataagaccatcaatatcaaaagaaaccaatgattgaatcatgatagagataaagactaacgggaacagcacgctgaacataaagctgaattcgttggaaattccagtgtctgcaaatcgatcagtgttaaaaccatacaaaatgattgttagtaaacctgctgataaacttaaaataaataataaaaccgaccaccttacaggcgggttcctatatagaaggatcagctcgtaatatagaaggcttctgctctctctagacttcttcaaatttgtatcagtcttgctatttaaatgatcattaaaaatggaaaggtttcttaaacttttataccacactataattaacaggattgttaaagataccattattggtatagatattgaaaaaattcgcatattattgatgtttagaaataacaaattatatttgagtataaaaaagatccaaagaattaaaattccatttgtgaaaaagccaataatgcttgagacatttatgaatttaggcaatactaatagccttataaaatgaagtctaaacaaatatcctagtatagcggacaataaaccaatcacagcaatcgcgaagacttcttccaaagactgatgaatgagataatatacaatcgatgaaccaacataaaaagatattaaagataaaaatgaactataaaatttactaatatcttttcctaatataaattgatccaatttgattcccagaatggccatttgttttttgtcggaggaaaacataactctgaaaatacttttatcaatatttacagtaaggataaacagaaaaaaagaaagatgaatgatgactagatttttaatgatgtacccagcaaagctgccaattattaaagggaaaacaacgaatgacaatatcaatacgaataatgcaagccatttgcttttagtattaaattttcgaatgtcgttggttaaaagaatttttgaataaattaagtatttattattcattgaaaaccatcctgacttaaatgtggaggaaagggcattttaaataataccctttcctaaattaaaacttattagtaagcgatagcatatctaattccgtatttttttgcataggaaaaaactagggatgcaatcgctccgagtccaaaagtccctagaaccgctgcaattgctccaacagtgccagcagcatttaagatggcactaattgaagtaagagcccatcccggaatctgaggataggttgctgctaggtctgcaatcggtaaaactggtgctgttgttgcgtataacattgtgaaaaatgtaagtgtaaaaagtagacctaaggctaaagaagcgttgatgcgttgttttttagaaattgtcatattttcaccccctttgtctcttgtagggctattattacacttatggttattttagtaaatagaacggattatctattctatttttattgatatataaatcaaaagtttctttttagaaaggaattacaatctcattttcttatttttattggttgaatatatcgaatatactgtgtttagatagaatgttagtagtttaatatagtcttgttagggggggcgatatctcctctgtatagaacgaaattcatgactcaattctcaagaattctggaaaaaggcatttatagcccgcatattaaaatcctagccaaggaagaagtgacaaaagttcacgaccaagtgctgaaggcacttgaggatacgtatcaggctgtattgagaggataaagaaaaaccggtccccgatcattcgggaaccggttttttatcttcaacatggtcataagctattgacgcttcagcatccgttcgattttctcttcatcggagtctaaagctccgtacagtacaccgggcatgctgtattgattccgcttccctgctgcagtataacgtaaaacaggggtgaccgtataaaaatcatattcgcctgtcatatgaaaagacgggacgacgatgtgtttgctttgtttcgcttgaatggcggtccccttgtcaaatgtatacgccatgacgccgtttagatcggtgatcttttcaagggaaatatcttttgcgagattgtttttcagccgaacgtccaaggacggttttggatatcctgcagtatattgaccggcaggcgacagatcgccgcttcgaacattgtgatggttttgaagggtgatctttccgatttgaaatgcttctctatcacgtccgttaaaagatatcagcagctgatccgctttttccggtttatcgcttgagacccggacatctacgatgatgttgacgagcgtatagcctttatggcgaatccctgtttcaaccttgtaatcgctgatttgtatatgattgttatcaaaagcgagcgacgtaaccgtctcaccgcttagaggaacgccggcgtttgctttttgcaggccgaaaatgttaaacgacatcgtctcgttttccatcatatggctgatgtagtttcgggcaaagaaaagcccggtttctttattttcgctggtctctgtaaagttcgccttgttgaagaaaataaagagagaaaatgccagagctgtgcatatggtgagcgtgatgatccattttatttttgacatggtgattcctttctgagtctgtcgatttgtatgagaaggaatgcggagatattcgcaataatcatccatagaggtccaatgatttcgccatataaagaagagaaggttcaaacatttcacagccggtcaaaattcagcagggtgtctgaatttcagtttgcttgaaaaaaggtgtagcaaatatattaaagattagctcgattaagctaatcttttttatttagaagaaaatatcccaatttagaaagtaagtacaaagtgaacacaatcattaaagttcttgaaatcacgagattccatgaatggctaagtcatatcctgaagatcaaagcctttgtatttaacataaaatacattgatattatgagagctgaaataattaaaagaatgccaaatgaacctgatttcttcatccaaatccccgccttatatcttagaagtatccagaaacaaaggagtacacattcaaaagccatctggtgtgcagtaagctgaaaattgagataattgaatatgggccatattaaaagacaatatcatgaagcaattcagcctagcgcttgatatcgctttgcctctgttggaacaattaaagcccctgtatatggggcttcaattctaagtttgttcaatatactacaattaatttgaattttcaatccttatttttcatttattgttaatgttttagtgaaatatgcgggtctagttgcaacggacccgcttatccagcctagtccgcaccgcttaccgtttcgacgcaatccgcttcgccttctgcgtattggcaaaatgcagctttgtgaatacccgcaatgcgtcttcgccgtgtttcttgatcagcttggcgccggcttcatcgacgagcgggcccgctcctttcggaagcgtaatgccggcttgttttgacagcttatccatttccattaaaaatgaatagcgtgcaatgatcgaggctgctgcaactgaaagatggatgccttccgcttttgtgctgaaatatgtacgttctttgacggcggttttgcctgccagatgcttgaagtatacggccggttcggcgaactggtcgattaaaatcgcttcaggccgggttccgtccaattttttgagaaggttgccgatcgcctggttgtggagaagagctttcatttttccttggctcatccctttttcctgcatttcattatacttttcgtttcttaaaacgagcaggctgtaagggactgtcttgattaagtcgcgcgcgatctgaacgatttgcggatcttttaagtttttcgagtctttaacaccgagttcttttaacagcggaagcttcgccttgtcagcgtatacgcacgcgacggtgatcgggccgaaataatcgcctgtcccgacttcatcggagccgatcacagacatggaaccgatgccttcaggcggctgatagacggacgggatgctttttttcgatgcgggctttttgggagccggtgtttcagcatccgccgtccagcgctccgcttccttttccgcgttttttccttggaacagcaccttccccgaccggtatgctgtaatggtgcacccttggggtttggcttggaaaactgcgccctgtacggaaagtgaagtaatgtcaggcccgtagtggctttgcatccgttcaataacagacgggggaacttttaaaacagaatgtgacacgttctaatctcctttattagctttaaatacgctaaatcattgttttcataagtgtatcataacagcggagggctcgtctttccattcaatctgtaaacatgttatgatatagactaggattctcgcataattggaatggaggagaaacgttgtctgatggtcaaaaaacgaaaacaacagttgacatctacggtcagcaattcacaattgtcggcgatgagagcaagagccatatgaggcacgttgcctcgattgtggatgataaaatgagagaaatcaacgaaaaaaatccgtatcttgatataaataaactggccgttttgacggctgtaaatgtggttcacgattatttgaagcttaaggaagagcttgagagattaaaaggacaaataaaagaaaaggattgaacatcacgatgttagatatcatcattatcattttgcttttgtccggtttgtttattggactcaaaagagggtttatccgccagtttatccgtttggttacgtttatcgcagcgatcgctgtggccgcaacctattacggcgaccttgcgcctaagctcggctggattccgtctcccgactttacgggcggccaggctgcgctggcgtttgtaaacggaagccttgaaggcgcttattacaatatgattgcgtttttgattctctttatcctgacgattatccttttgagagttgccgcatcgtttttggatgccgtcgcaagcataccggttctcaaacagatcaaccaaatactcggagccgtgctcggttttgcggaaatctatctgttcgtgtttgtcgttctgttcatcggaacgcttctgccgattgatgtcctgcaaagcatgatggccggttcagtcatggctgatttgatcattcataaaacaccgtttttatcaaacatgttaaacaatctgctgcatcagtacggatctttgtaaaaacttctctgtttgtagggaagttttttttcggggctcttgagaaccccggaagctgtcggatatgcctgtttgttgtaggatcagccaaaaatttgtatgattgaagcaggatgaacgaggggaaacaagaggtgaacaacatgcataaaaaagatatcatcaaattgcttgaaacgattgcgatatatatggaactaaaaggggacaacccgtttaaaatctccgctttcagaaaggctgcggcagctcttgaacaagacgaccggagcctctcggaaatcgatgatatgacgtccctgtccgggatcggcaaaggcacatacgctgtcatcaaggaatatatggacacgggagcatccggaacgctggaacgattaaaggaagaggttccggaaggacttgtcccgcttttgaagcttccgggtctcggcggcaaaaaaatcgccaagctgtatcaggagctcggcgtctgtgatgcggcatctttaaaagaggcctgcgaacagcaaaaggttcaggggcttgccggattcggcaaaaagacggaggaaaaaatcctgcaggctttgggtgaagcgggaaaacgccctgaacggtacccgatcgcggtcgctttggccgtcgctgacatcatcgaagagcagcttgaagggctcccgggcctcattaagttttcacgggccggaagcctgcgccgcgccaaagaaacggtgaaagacctcgattacattatggctgtcactgatccggaacttgtccgggaagggctcttaaagctttcgaacatcaaggaggtcattgccgcaggagatacgaaagtgtctctcacatttgcgtttgaatacgaaatcagtgcggatttccggctggtgacagaggaacagttcccaacgacgcttcatcattttaccggatcaaaagaccacaatatcaaaatgcgccagcttgccaaagaaaaaggcgaaagaatcagtgaatacggcgtcgaaaccgttgaaactggagaaattaaaactttctcaagcgaaaaagagtttttcgcccatttcgggcttccgtttattccgcccgaactgcgggagacaggaagagaagtcgaggactacagcgttgacatcggactcgtttccgccgaggatattcaaggagaccttcacatgcactcggcttggagcgacggtgctttttcgatcagggaaatggcggaagcatgcatggcaaaagggtaccgctatatggcgatcacagaccattcccaatatttaaaagtcgcaggcggtttgacgcctgagcgccttcgcatgcaggcgaaggaaattgatgaactgaataaggaatttaccgattttcatatttttaaaggcgtggaaatggacatcctgcctgacggaacactggattatgacgacgagctgctggcggaaatggatcttgtcattgcttccatccattcaagcttttcacagccgcagcatgtcatcatgaagcggcttgaaaccgcgctgctgaatcagcacgttgacattatcgctcatccgaccggccgtctgatcggaagaagggcggggtatgaagtcgatattgaccagctgatcgaacttgcgaaaaaaacgaatacagcattggagctgaacgcaaatccagcgcggctcgatctcagaatggagcacttgatcaaagcgaatgctgccggagtgacactcgttattaatacggatgcccacaacacagcgatgcttgatgatatgaaaacgggcgttacggcagcgagaaaaggatggacgccaaaggccaatgtattaaacacccgctcctttgaagaagtccaggcatttttgtcgcgccatcgatcttaaggaggtttaatggacgttgcagcaaaaagcgctatcagcacttgaatttcataaagtaaaagaacagctcacagagcatgcggcatcttctttggggaaggaaatgcttttggaactcaaaccttcccgttcgctcgaagaagttaaaaagctgcaggaagaagtcgatgaagcaggaaccgtcctgcgtttaaaaggaagcgcccctttcggcggccttacggacattagaaaagcgttaagaagggcagaaatcggcagcattttaagcccggcggaattgactgaaatatcgggtctgctatacgcagcaaaacagatgaagcactttcttgaaggcctgttcgaagacggggttgagattccttatcttcatcaatatgcagaaaagctcataccgctttccgaattggaaagggacatcaattcgtgcatcgatgatcatggggaagtgcttgatcatgcatcagagacgttaaggggaatcaggacccagctgcggacgcttgaatcaagaatcagggaccggctggaatcgatgctgcgttcttcatctgcgcaaaaaatgctgtcggatacgatcatcacgattcgcaacgaccgcttcgtcatccctgtcaaacaggagtacagatcaagctacggaggaatcgtgcacgatcagtcttcttccggtgcgacattgtttatcgagcctcaggcgattgtcgatatgaacaatgcgcttcgccaggcaaaagtaaacgaaaaacaggagattgaacggattttgcgcgtcctgacagaaaagacggcagagcacacaaatgagctctttcacgatgtcaaagtgcttcagacgctggactttatttttgcaaaagcaaaatatgcaaaagcgacaaaagcggttaaaccggctgtcaacgctgacggctatgtccgcctgattcaagcccgccacccgcttttgcccctggatgaggtcgttccgaatgatattgagctcggcggagagtatacgacaattgtcatcacgggcccgaacacgggggggaaaacggtgacgctcaaaacgctcgggcttttgaccatgatggcgcagtcgggattgcacgtaccggcggaagaaggatcagagaccgccgtatttgatcaagtatttgccgatatcggcgatgaacagtcaatcgaacaaagcttaagtacgttctcgtcgcatatggtcaacatcgtcgatattttgaaagacatgacggaaaacagccttgtgctttttgacgagctcggtgccggaacagacccgcaggaaggcgcggcccttgcgatcagcatccttgatgaggtgtgccagacaggcgcacgcgtcattgccacgacccattacccggagctgaaggcatacggctacaatcgcgaaaatgtcattaatgcaagcgtcgaatttgatatcgatacactatcaccgacatacaagcttttaattggagtgcccggccgaagcaatgcgttcgaaatctcgaagcgcctcgggctgcctgattacctgatcggccgcgcaaaagcggagatgacggccgaacataatgaagttgatacgatgatcgcatcgctggaagacagcaaaaagcgcgcagaagcggagctcaaggagaccgaagccatccgcgcggaagctgaagcccttcaccgcgacctgcagcagcagatcagcgaatggcaggagaaaaaagacaagctctacgaagaagcggagcaaaaagcggctgaaaaagtcaaagcagcgatgaaagaagcagacgacatcatccagtcgctccgcatgatcaaagaagaccataaagcatttaaagaccatgagctgatcgaggcgaaaaagcgccttgaagaagccgtgccttcgtttgaaaaagcgaaaaagccggctcagaaaaaaacggacaagcgcgaattaaaaccgggcgatgaagtcaaagttttaacctttggccaaaaagggacgctgctcgaaaaaacgggtgcggccgaatggaatgtgcaaatcggcatcctgaaaatgaaggtcaaggaaaaggatctggaattcctgaaatcggcacccgaacccgagaaacaaaaaacgatcgccgccgtcaaagggaaagattatcacgtctcgctcgaactcgaccttaggggggagcggtttgaaaatgcgcttcaccgggttgaaaaatacttggatgatgcggtgcttgcgggctatccgagagtctcgatcattcacggaaaaggaaccggcgccctccgaaaaggcgtccaggacctattgaaatcccaccgcaatgtgaaaaactcccggttcggcgaagcgggagagggaggatcaggagtcaccattgtcgaattaaaataataaagggagtctaaaaggatgaaagagttttgggagaacaaccttgtggaaatcgccgcgtactacagtgtttccgttttgtgtcttgtgatatttttatctgtgtttgaactcgtcaccacgtataaaaattgggaggagattcaaaaaggaaacatggcggttgcgatggcaacaggcggaaaaattttaggcatcgccaacgtgctgcaaaaatcgatcagccagcataattccctgctgcaaatgatggggtgggggctgttcggttttatcctgcttttgatcggctacttcatttttgaatttctgacgccgcgctttaaaattgacaaggagattgaaaacgacaaccgcgcagtcggcttcatttcattcgtcatttcagtaggcctgtcatttgtcgtggcttcgggtatctaaaggggatcaacatggagaaattagcgaaagtcctgttttttacagctggggtatttgtggttatcggcctgatttatatgatcttttatgcttgaaaaaggtgtcctaaaaaaggggcgcctttttaaaaatgaaaaaatatcattactttctgaatattgttttgatatactcaaatcaagaatatattgtttaaaaggggggagcttatgccgactgaaaaaccgtggctgcgtcattatcccgaacaaattcctcacgagctgcaatttgaagatcaaacactccattccatcctgcaacaatccgcccagcagttttcagaaaaaacagcgattcattttctaggaaaaaaacgttcgtaccgggaagtttacgaggatgctttaaaaatggcagattacctgctgtcgctcggcattcaaaaaggagacagagtatcgatcatgctgccgaactgcccgcaggcggttatcgcgtattacggcgttcttttctccggcggcatcgtcgtccagacaaatccgctgtatacggaaagggagcttgaacatctgcttcatgacagcggggcaaccatcatcattacgctcgacatgctgtacccggcggcatataaaatgaaagcgctaacaagcattaggcacatcattgcgacaagcataaaagattacctgcctttccctaaaaatctgctgtacccgatcgttcaaaaaaaagagaatcaaatgtccgttgagatcaatgaaaatgagacgacccaccttttccgcaccatcatgaaacgccccgttccaagcggaccgcccggtattgaaattgatccggcccacgacattgccgtcctgcagtataccggaggaacgacaggcacgccaaaaggcgtcatgctcagccaccgcaacatactagccaacatggagatgtgcgccgcctggttttatcaattgaataaaggggaggagaaggtgctggggatcgttccgttttttcacgtctacggaatgacggccgtcttgaatttcacgatcaggcaggggtatgaaatgatcctgctgccgagatttgacgcgcgcgcagcgctgaaaacgatcgataaagaaaagccgacgatatttccgggggcgccgacgatttatatcgccctgttgaaccatcccgaccttcaccaatacgatctgtcatcgattaagagctgtttgagcggatctgcggcgcttcctgttgaagtcaaacagcagtttgaaaaggtgacgggcggaaggcttgtcgaaggttatggaatgtctgaaacgtcgccggtcactcacgccaattttatttgggatttgaataaagcgggcagtatcgggtgtccttggcctggtacagacgctgctatctattcggaagaaaccggcggttttctcgggccttatgagcatggagaaatcgccgtcaaaggaccgcaggtgatgaaaggctactggaacaatgatgaagaaaccgctcagagtctaagggacggctggttttttaccggagacatcggctacatggataaagacggcttcttttatatcgtcgaccgcaaaaaagacgtgatcattgccgggggatacaacatctacccgcgcgaaatcgaagaagtgctctacgagcatgaagcagttcaggaggcggtcgttgccggcatccctgatgaatacaggggggaaacggttaaggcttttgttgtgctgaaagatcatgttacaataacggagaaggaattggacgaatatgccagatcgcgtctcgctccttataaagtgccaaaagtatacgagttcagggacgaacttccgaaaacggcggtcggaaagattttaagaagagcgctcgttcaagaggaaaagaccggcgtctgaaaaagcaaagtctgccgtcgattttgacggcatgcttttgtgatgcgatttacttttagcttcttgacaaagcgtccatttttatttacgattaactcatgaatgagtattcattcattaatttgaaaggaacgaagccaattgaaacaaaagagaccaaagtatatgcagattatcgacgcagctgtcattgtgattgcagaaaacggataccatcaggcgcaggtttcaaaaatcgccaagcaggccggggtggcggacggcaccatttatctttattttaaaaacaaagaagacattctcatctcattattcaaagagaaaatgggacagtttatcgagcagatgagcgaagaaatgacagcgaaaaattcggcgacagaaaagctttcgctgttcatcaaaaagcactttgaactgctcagcagcgatcgccacctcgcgattgtcacccagcttgagctgaggcagtcgaatcttgagctgaggctgaaaatcaatgagattctcaaagggtacttaacgatcctggaagacatcatcaccgaaggaaaagaagctggagaatttaaaagcacgcttgacgtccgccttgcgaagcagatgattttcggtacggtggatgagacggttacaacctgggtgatgaatgatcaaaaatacgatctcccaaacctggcagacagcattcatgaattgctgatccacgggttcagcagccaaaagacgaaggaggaggaataaaaatggcagcattatcatacgccgtagacggccatgttgcgacgattacgattcagcacccgccggcaaatgcgctatcgacgcaagtgcttgaagatctttctgcatgccttgatgaactttcagaacgtcaggatgtcagaagcgtcgttattcacggggaaggaagatttttctcggcaggcgctgatattaaagagtttacatcattgatggacgggtctgattatgcaaatttggctgataagggccagcagattttcgaaaaagtagaatcttttccaaaaccggtgatcgccgcgattcacggggccgctcttggaggcggtcttgagctagcgatggcatgccacatccggattgccgaggaaagcgcaaagctcggccttcccgaactgaatctcggaatcattcccggctttgcgggaacgcagcgccttcccaagtatgtgggcaccgccaaagcgcttgaaatgatcgggacatcagagccgatatccggcaaggaagcttttgaatacggtcttgtcacgattttggcggcgaatgaagaagaagtgctgcaaaaggcaaaagagctcgcacaaaaattcgctgaaaaaagtccgcagacgatggcttatgtcattgaactcctgaattcgagcaaagtgtattcgtatgaaggaggcctcaagctagaagggaaatacttcggcgaagtgttccaatccgaggatgcgaaggaagggattcaggcatttcttgaaaagcggaagccgcattttaaagggaaataacaaacgtgaaaacaaaggggatgaacagaacatgaacatttatgtcttaatgaagcgcacgtttgatacagaggagaaaattcagatcgaacaaggggaaatcaacacggacggagcggaattcatcatcaatccgtacgatgagtacgccattgaagaagcgctccagttgaaagagaagcacggcggtgaaattacggtcgtgacagtcggcgaggaagaagctgaaaaagaactcaggacggctctggcgatggggtgcgacaaagccgttctgatcaacattgaagacgacgtggaagaagcggaccaatatacggcttcagccatcctttacaactatttgaaagaccgcgagtacgacattatactcggcgggaatgtggcgatcgacgggggatcgggacaggttgcgcctcgtttggccgaactgctgggcattccttgtattacgacgattacaaagctgacggtaaacggcggagatgttgaagcggaacgcgacgccgagggcgatcttgaagtgatccaaacatcgcttccaatcgtagcgactgcacagcaggggttgaacgagccgcgttatccgtctcttccgggaatcatgaaggcaaagaaaaagcctctcgaggagcttgagcttgatgatctcgacatcgacgaagaagacgtggctgcgaaaacaaaaacgatcgaacggttcctgcctccgaaaaaagaagccgggaaaatccttgaaggggagccggagcagcaggcggcagaacttgtatcactgctgagaagcgaagcaaaggtcgtatgaagccgaagggagaaataacacggtcattaaaatacagggggaaatggacatgagcaaaaaagttatcgtattgggagagttcagagacggttcgttgaggaatgtgactttcgaagcgatagccgcaggaaaaacggttgccgaagggggagaggtgatcggcgtactgttcggtgaaagcgtttcaagtcatgcggcagaactgatccattacggcgctgacagagtgcttacagccgaaaacccgctcttgaaaaactatacgtctgacggctatgttcaagccttgttgccgatcatagaacgcgagaatccggacgtcatcattttcggacatacgtcaatgggaaaagacttgtcgccgaagctttcagcccgtatgggaacagggctgatatcggatgccgtcgatgtcgaagtggccggcggcaacatcgtgtttacaaggccgatttactcgggcaaagcgtttgaacggatcatttccgaagatgaaacgatttttgcaacgatcagaccgaataatatcgccccgcttgacaaagatgagacgcggacaggagcggtcgaaagcatcgaagcagatattcgggacatcagaacggtcatcaaggatattgtcaaaaaaacgtccgaaggcgtcgatttgtctgaagcgaaaattatcgtagccggcggtcgcggcgtcaaaagcgaggaaggctttaaaccgctgcagaagctcgccgatgtattgggcggggcggtcggcgcttcaaggggagcctgtgacgcagactactgcgactattcgcttcaaatcggccagaccggcaaagttgtgacacctgacttatatatcgcctgcggcatttcaggagcgattcagcacctcgcagggatgtcaaacagcaaaatcatcgttgccatcaacaaagatccggaagctgatatatttaaaattgccgactacgggatcgtcggcgacttatttgaaatcgttccgctgctcacggaggaatttaaaaagctgagcgtcagcacatgatcaaaagccggcctgaaatggccggcttttgacataggcacatttccgccttctgcaaaataacatgggatatggacattttcagaaaggctaaaatcccgatgtgtaaaactgtgcagatagggaaacgtataatcaagcattatgttagcgtgaaccaaagggagatgctatactaaaaagcataatttcacaattggaggaatgaaagaatggctatcgtaaaagcaactgatcaaacattctcatctgaaacaagcgaaggcgtagttcttgccgacttttgggctccttggtgcggaccttgtaaaatgatcgcgccggtacttgaagagcttgatcaagaaatgggagacaaactgaaaatcgtaaaaatcgatgttgacgaaaaccaagaaactgccggcaaatacggcgtgatgagcatcccgactctcctcgtactaaaagacggcgaagtggtcgaaacatctgtcggctttaaaccgaaagaagcgcttgaagaactggtcaacaaacatttgtaaaatagaaacctgtgaaaaaggcgattccaaagggatcgcttttttcttacaagtcatcttctttctccatttgtggcgaacgtacggtcggtcatggtaaacttaaatgaaggaaaaacgccgaaataaggaaggatttttgatgaacaaaaaaatcaaagaaaagctggcccttcttccggatcagcctggctgctacttgatgaaagacaggcaggataccgtcatctacgtcgggaaagcgaaaatcttaaaaaacagggtccgctcctatttcagcgggtcccatgatgccaaaacacagcgtcttgtcagtgaaattgaagacttcgaatacattgtcacatcctcgaacatcgaagcgctcattcttgaaatgaatttaatcaaaaagtacgacccgaaatataacgtgatgcttaaagatgataaaagctacccgttcattaaaatcacgaacgagcggcatccgaagctgattgtcacaaggaaggtcaaaaaagacaaaggccgctatttcgggccgtaccccaatgtccaggctgcgagggaaacaaaaaagctgctggaccgcctctatccgctcagaaagtgcgccaagctgcctgaccgcgtctgtttgtactatcatctcggacaatgtctggcgccatgcgtatatgatgtgtctgaagagacaaacagacagctcacagaagaaattacccgctttttaaaaggcggctacaatgaagtgaagaaagagcttgaagcaaaaatgctcgaagcctcggaaaacctgcagtttgaacgggcgaaagaattccgcgatcaaattgcccatatcgagtcaacgatggaaaaacagaaaatgatgctgaatgacatggttgaccgcgatgtatttgcctattcgtatgacaagggctggatgtgcgtccaggtcttcttcatcaggcagggcaaattgattgaaagagatgtcagcatgtttcctttatacagggaagcagacgaggaatttctgacattcatcgggcaattttactccaaaaacaaccattttcttccgaaggaaattttggtgcctgacagcgtcgacaaggacatgattgaggagcttttggacgtgaacgtgcgccagccgaaaagaggagcgaaaaaagacctgctgctccttgcccataaaaatgcaaagctcgctttgaaggagaagttttcgctcattgaacgggatgaagagcggacgatcggcgcgattgaaaagctcggaaaagcgctggacatctacacgccatacagaattgaagcgtttgataactcaaatattcaaggaacggaccctgtttcggccatggttgtatttctcgatggaaaaccgcataaaaaagagtaccgcaaatataagatcaagacggttgaaggtcctgacgactacggatcaatgcgcgaagtcatcagaagaagatatacaagggtgctgaaagagaatctgccgctgcctgatttaattttgatcgacggcggaaaggggcaggtgtctgccgcccttgacgttctggaaaatgaactgggtctcgatgtccctgttgccggtctggtgaaagacgataagcacagaacatccaaccttttgatcggcgatccccttgagatcgtccagcttgagcggaacagccaggaattttacctgcttcagcgcattcaggacgaagtgcacaggtttgcgatcagcttccacaggcagctcaggggaaaaagcgcatttcaatcggtgctggacggcataccgggcgtcggcgaacagcggaaaaaactgctgttaaaacatttcggttccgttaagaaaatgaaggaagcgagcgccgaagatatccgcaagctcggcatacctctgaaaacggcgcagctgatcgaagaggcattgaaaaaataatgttgaacttttaaaaagaatctgatagaatttgtactaatttcataataagatcgtgtgatatggtgaagatagaggtgcgaacttcaagagtaggcttgatgaggaagatggattccgatgaagaaagccgaaaggggagcgtcgccgaagcggggaaaaatccactcgtttttcctgctggctttacattgaataaatgtgaggctgtcaagaaatcatttcttggagagctatctcgttgtttaagatcatcggcatttttgttggttaaagcaatgagggaattctctcgttgctttttttgtgcaaaaaaaaccgtacaggccgccggtcaagctttcctcttcatacataaacaaacacgaacgaaaacaaaaagggtggtatttgatgggtctcatcgtccaaaaatttggcggaacttccgtagggtcagtggaaaaaatattgaatgtcgcaaaccgcgtcatcgaagaaaaacagcgcggtcatgatgttgtcgtcgtcgtttcggcgatgggcaaatcgacggactccctcgtcgcgcttgccaaggaaatcaccgagcagccgagcagcagggaaatggacatgctgctgacaacaggagagcaggtgacgatttcgctgttgacaatggctttgcagaacaaggggtatgatgcggtttcctatacaggctggcaggccggcatcgaaaccgaaaatattcacggcaacgcaagaattacgaacattgatacagccaagctgaaagagcgcctgaatgaagggaaaatcgccgttgtcgccggattccagggcgtcacagcggaaggcgaaatcacaacgctcggcagaggcggatcagatacgacagccgttgccctcgcagcagccctgaaagctgataaatgcgacatttacaccgatgtgccgggggttttcacgacggatccccgctatgtgaaaacagcgcggaagctggccggaatctcctacgatgaaatgctggagcttgccaatcttggagcaggcgtccttcatccgagagctgttgaatttgcgaaaaactaccaggtgcctttggaagtccgttcaagcaccgaaaaagaagccggcacattaatcgaggaggaatcatcaatggaacagaatttaatcgtaagaggcattgcatttgaagatcagatcacacgcgtgaccgtatgcggcctggcgagcggcctgacgacgctgtcaacgatttttacaacgctcgccaaacagaacatcaacgttgacatcatcattcaatcggtgacaggcacaagcaaaacgtcgatttctttctcagtgaaaacggaagacttaaaacggacggttgaagttctagaagaatacaaagacgcgctcgactatgaacagattgaaacggaaaacaggcttgccaaagtgtcgatcgtcggttctggcatgatctccaacccgggagtagcagcggaaatgttcgctgtgctggcggaaaaaaacatccaggtcaaaatggtcagcacatccgaaatcaaagtttcgactgtcgtcaacgaaggcgatatggtgaaagccgttgaagcgctgcatgatgcttttgaactgtcgaagcagacagcagtcatttaaaaagaaaaaggcgggacttttgcagtctccgcctttttgcatagttatgccgggtctttcaaatcccatttcaccgttaaaaccacttttccggctctttttttcacctgttcataagattcggcaatttgttcgttcatcagctggatttgctcggcgataaacccggcttcaagctgaaagcagggctccttttgatacttgaggcggtttgaaaccagcgggccttcgagttcaaactcaagctcctgtttttttgaatggacgatcgcaagcgttccccagcctgcatcctgaaagaaagcgggaagatcctcccgggattcaagcgggaacttgcgggcgagcttttttcccgcccagtacatcatatctgcgtagtcttgtcccagcatatcgggaagcagcacttccctgatcaactcatagccatatgcggagacttccagctcttttaattgcgctaagtttgcttcatatttattcatatccaatgtctcccctcttttctccgtttattatagcttaaatggggtgaaagattacagcggagacatgcatttaggaagaaaaaaatctgatatatttatattttgataaaataaaattttcaaaaatatgattaaattttagaaaatttcaatttatgtacgcgttttcttgacgcctatttctcataggagtaaaatgaaattgtcataaaaacttaacaaagtgcgatatttgaaacaggacgggggataggagacctttcatttttactgcacttttcaactagggggtaaagcaatggccgggaacagagagtttgtttatcgaagactgcattctttgcttggcgtcataccggtgggcatatttttaatccagcatttggttgtcaaccattttgcggcaagcggagaagaggcgtttaataacgccgctcactttatggaaaacctgccgttcaggtacgctttggaaatcttcgtgattttccttccgctgatttatcatgctgtttatggagtatacatagcttttacagcgaaaaacaatgcgaacagattcggcttttttagaaactggatgttcgttctgcagcggattacaggaatcattaccttgatttttgtcagctggcacgtgtgggaaacacggattgccgcccaaatgggggcagaggtgaactttgacatgatggctgatattttgagctccccgatcatgctcggcttttacattgtaggtgtcctctcaacaatcttccacttttcaaacggtttatggtcgtttgctgtcacttggggaatcactgtttctcctcgctcacagcgaatcgccacgtttgtgacaatgggagtctttgttgtgctgtcctatgtagggctgagagcgattttggcatttgtgtaaaagaactagattactagagggagtggggcaggcatgagcaattcaagcatcatcgttgtcggcggaggactagcgggtctgatggcgaccattaaagctgcggaagcaggaacaaatgtaaaactattttcgatcgttcccgttaagcgctcacattccgtatgtgcgcagggcggaatcaacggagcggtcaatacaaaaggtgaaggagactccccatgggagcattttgacgacacggtgtacggaggcgactttctggcgaaccagccgccggtcaaagcgatgtgtgaagcggcgccgtcgatcattcatttgcttgaccgcatgggcgtcatgtttaacagaacgcctgaagggctgcttgacttccggcgcttcggaggaacccagcatcacagaacggcatatgcgggggcgacgaccggacagcagctcttgtacgcgctggatgagcaggttcgccgcttcgaagttgaagggctcgtttcgaaatatgaaggctgggagtttctcggagccgttcttgatgatgacaatacgtgcaggggcatcgtcgcccaaaacttaacgacgatggaaatcgagtcgttccgttcggacgcagtcatcatggcgaccgggggaccgggcatcatcttcggaaaatcgacgaactcgatgatcaataccggatcagccgcttcgatcgtttaccagcagggtgcttactatgcgaacggagagttcatccagatccatccgaccgccattcctggagacgacaagctgcggctgatgagcgaatcggcgcgcggtgaaggcggacgagtctggacgtataaagacggcaagccttggtatttcctcgaagagaaatatccggcatatggaaaccttgtgccgcgtgatattgcgacgcgtgaaatatttgatgtgtgcgtcagacaaaagctcggcatcaacggcgaaaacatggtttatctcgatctttcccacaaagatccgaaggaattggacatcaagctgggcggaatcattgaaatctatgaaaaattcatgggtgacgatccgcgcaagctgccgatgaaaatcttccctgcggttcactactcaatgggcggactttgggtcgactacgatcagatgaccaacattcctggactgtttgccgcgggagaatgcgactattcgatgcacggcggaaaccgcctgggagcgaactcgctcttgtcagccatttacggcggcatggtggcaggtccgaaagccgttgaatacattcaaggtctcgaaacatccgcagaagatctgtcttcttccgttttcgatgcatacgtcaaaaaggaagaagaaaagtgggctgacataatgaaaatggacggcaatgaaaatgcttatgtccttcataaagagctcggcgaatggatgacagacaacgtgacggtcgtgcgctacaatgacaagctgctgaaaacggatgaaaaaatccaagagcttgccgagcgctaccgaaacatcaatatcaacgatacggcaaaatggagcaaccagggcgccgtattcacgcgccagctgcacaacatgctgcaattggcacgggtgatcacgctcggtgcatacaaccggaatgagagccgcggcgcccattataaaccggatttccctgaacgtaatgacgaggaatggctgaaaacaacaatggcgaaacatgcaggcgattttgaagccccgaaattccattatgaggatgtcgatgtttcattaatcgcaccgcgtaaacgggattactcgaagaaaaaggtggcgaaatcatgagtgaaaataagacaatcaagtttatcatcactcgtcaggatacatcggattctaatccttaccaggaagagtttgaaattccataccgtccgaatatgaacgtgatttccgctttgatggaaatcagaaggaacccggtgaatgcaaagggagaaaaaacgtcgccgattgcttgggatatgaactgtctcgaggaagtgtgcggcgcttgctctatggtgatcaacggcaagccgagacagtcctgtacagcgctgatcgaccagcttgagcagccgatccgccttgaaccgatgaaaacattcccggttgtccgcgaccttcaagtggatcggagccgcatgtttgattcgttaaagaaagtcaaagcatgggtgccgatcgacggcacatatgatctcggaccgggaccgagaatgcctgaaagaagacgtcagtgggcttatgagctgtcaaaatgcatgacttgcggcgtgtgtcttgaagcttgtccgaacgtgaacgataaaacaaactttatgggacctgcaccgctctcgcaagttcgcttattcaacacccatccgacgggagcgatgaacaaatctgaacggcttgaagcgattatgggagacggcggactggccgaatgcggcaactcgcaaaactgcgtgcagtcgtgtccgaaaggcatcccgctcacaacctcaatcgctgcattaaacagggatacgaccgttcaggcgtttaaaaacttcttcggaagcgacaacacggaataacacgaaaaaacgcacctcttcaaaccgaagaggtgttttcatgatcaaaggggatgaaaacattgaaattgccgggatatatcgaagaaccgtttgacacatggtgtcagtcattttctttttttgatgaagtttccgtccgtttttcagaaacggacatgttcggtcatatgaacaatgtcacaccgtttgtctacttcgaagaagcgaggatttcctatttcaagcacctgggcgtcatggaccgcctttcagacgggaagagcgcggccattcccgtcgtggcgagccagcaatgcgactattttcagcaggtcatgcttcatgaacgtttaaaaatcggcgtcaaaacagcatctgtcggcaacgcctcgctcaccctccattacgcagcgaaaaatggggaaggcggcctttgctttacaggactggcggttatggtgcaaattgcgaaagatacgggtaaacccgtgaaatggacagacgaacaaaaagcaaaactgcttggcaataactcatttcctgagaaataattgacagggagaggaaaatgaaaaaagcgataatcatcggcgcgagttccggaattggcaatgcgcttgccaagcagctgtcagccggaggagtggaggtcggtcttgctgcaagacggtatgagctgctagccaaattgcgcgacgacctccctggaccttcatacattaaaaagatcgatacagccgacagcgaacactcgcctatactgttgaaagaactgcttgatgagatgaatggggcagacgcagtcttcatctgttcaggtgttggatatttggaaagcgaaatggattggagcaaagaaaaggaaatgatcgatgtcaatgtgacgggatttgtgtcctgctcgaacgtgttgatggagcattttatcaaaaacgggagagggcatttagtcggcatttcatccatcgccgcgctgagaggaaacggagggaccgtcacctacgccgcttcaaaagcattcgtttcaaattatttaaaaggacttcgtcaaaaagtgaaaaaactcggttgcgatgaaattgcggtcaccgaaattcagcccggcttcgtggacacggctcttgcaaaaggtgatcatctgttttggacggcttcgcccgaaaaagcggctgcacaaatcatcagcgctgtgcagaagaagaagacgcacgcatatattacgaagagatggcggctgatctcctggattttaaaatgtcttccttagaagttcagccctgaaacgatgcctgtgtcatgatttgaaaaataggtgtttgagggaacccttttctccgtcagaaacgtcaccgaccttgcgtatgtttcatatgatatcacgactatatttgaaacccattcgtttcagatcagctctcaccttagcaaggagggttacaatacttgaaggagaaagagtttcaatcaaagccgctgctaacaaaaagagaaagagaagtgttcgaattgctcgttcaagacaagacaacaaaggaaatcgcaagcgagctctttataagtgaaaagactgtacgtaatcacatttccaatgcaatgcaaaaattgggagtgaaaggccgttcgcaagctgttgttgaacttcttcgaatgggtgagctagagctctaaattgagccggtgttccttcttgtatcaagaagggaaccggttatttgttttttcaagagcaatttgtatattcatgttgaagtcttgcaatttgtgtagaaaagaaggaaaatagactcaagtgttttgaaaacaaaacaacgagtcgagcgaggtagagaaaatgaattcgaatgcttctttgaatcacatagcggacattgaaaaatcactccgccatattgcgggcatcattaaacaaaaaggaagagaaattctcacccaatatacgattacccctccccagtttgtcggtcttcaatggctgtatgaatacggggatatgacgatcggcgagttatcacaaaagatgtacctggcgtgcagcaccacaacggatttaattgaccgaatggagaaaaacaacctcgttgaacgggttaaagatccgtccgacaggcgcgtagtccgcattcatcttctatcggaaggagagcggatcatccaggaggtcattcaaaaaaggcaggactatttagaagacatgttagaggcgttttccgaggaagaaacagccgcgtttgaaaaattattaattaaacttcagcaggaaatgaacagaaaatgaggcgattttgttggatcaaccgataggagtcattgattcgggagtcggcggtttaaccgttgcaaaagaaatcatgaggcagctgccgaaagaaaaaattatatatcttggagacacgaaaaggtgtccatacggaccgagggacagaaaagaagtcctgtcatatacatgggaaatgacaaattatctgttatcccgccaccatattaaaatgctcgtgatcgcctgcaatacagcaacggccatcgcgctagaggaaatcagcagggaagttgcgatacccgtcatcggcgtggtgcagcccggagccagaaccgcgattaaagtgacggaaaaccagcgaatcggcgtaatcggaacggaaaacacgatcaaaagcggcgcatacgaagaagcgcttctttcgctgaacggagatttaacggtggaaaatctggcttgcccaatgtttgtcccgtttgtggaaagcggcaaatttttggatgagacggctgatgaaatcgtcaggacgtcactgcacccgctcagagattcatcaatcgatacgctgattctcggatgtacgcattatccgattttaaaagagccgattcagcgctatatgggagagcgcgtcaacatcatttcctccggagatgaaacggccagggaagtcagcacgatcttgtcatacaacggtttattaagcaaaacggcggaaccgccggaacacttgtttttaacaactggggagcgtgcccgcttcacaaaaattgcaaacgattggtttggatacgaagtgaaaaatgtggaaagcatttctcttcaggagaccgctgtaaaataaagctgccgcacatgcaaacggcagcttttttcatggccttttcttttaaagaaaaggttttttgtattcagagggatttttttaaaaagcggtctaattcaaaaacgggctcgtatacataatagtacaaactgccttaggagggaaaagtatgctgaaaaaaggaatgaaaggaatcgcggttacggttacggcctccgcgctgcttctttccgggtgcggaatatttcagtcagatcaagcctcagaggagatagatccgccgcaggacatcacatatgtaaaagaggagaaggagcaagacaaaacagacaaaaccaaagataaaacagaagacaaaggcagcaaaacgacaagcgacgataaagccgctcaaacgggcgatacggtcatgagagagctttatctcattgataagaacggctatgtgacagcgcagacgctgccgctgccaaagcaggaagggacggctaaacaagcgcttgaatacctcgttgaaggcggccctgtttcaaacatcctgccaaacggattcagagccgtgctgccggcggatacaacggtcaatgttgatattaaagaagacggaacagcgatcgctgatttctcaaatgaatttaaaaactataaagctgaagatgagcaaaaaatcgtacaggcgattacatggacgttaacgcagtttaactcgattgataaagtgaagctccgcatgaacggccatgatttgaaagaaatgcctgttaacggcacgccgatttcagaagaactcagccgcgaggacggcattaacctcgacacggcgggtgtgacagatataacggcgacacagccggtcaccgtctattatttggctgaatcagataaaggcacatattacgttccggtgacaaagcggacgtctgcaaaagaaaaagatcaggtgacggcggcgattaaagagctgactgaaggaccggacaataaaagcggcctgctctccgatttccagggcgacgtcaagcttgaaaacaagccgaagattgaagacggccatgtaaccctcgactttaacgaagcgatctacggaagtgccgacggccagaaaaaagtgatatcggatgaagtgttaaacagtatcgtgttgacattaaccgaactgcctgatgtgaaaagtgtgtcggttaccgtgaacggaaaatccgagctcgtgaatgaaaaaggagaaaagctttccaagccggtttcaagaccgagcaaggtgaacacaggtagtttttaagccgaaatttttgatatactatagaaaaagaggtgagcgatcaaagctgcctctttctttattcagctttttggaagagcggaatgattgtgaaaggtttatgtacatacaatcggaggtaaaaaatgagatacgatggaagaaaaaacaatgaactgcgccctgtcacaatggacctcgactttattacgcatcccgaaggatcggtcctgattacagtcggcgggacaaaggtgatatgcaacgcgtctgtggaagaccgcgtaccgccctttttgagaggagaagggaagggctggatcaccgcggaatacagcatgctgccgcgggccacgaaccaaaggacgatcagggaatcgtcaaaagggaaaatctccgggcggacgatggaaatccaacggctgatcggacgagctcttcgggcggttgttgatttggaaaagctcggtgagcggacgatctggatcgactgcgacgtcattcaggcggacggaggtacgagaactgcgtcgattaccggagcattcaccgccatggcgcttgccgtcggaagactcgtcgaaaaaggcgcgctgaaggagatgccgatcaccgactttttggctgccacttcagtgggcatcgataaggaaaaaggattgatccttgatttgaactaccaggaagattctgcagctgaggttgatatgaacgtcgtcatgacaggcgaaggccgctttgtcgaacttcagggaacaggagaggaagcgacattctcaagaagtgaactggacgggcttttagagctggctgaaaaagggatcgccgaactcatcgaaaagcagaaagaagtgctcggcgacgttgcattatctattcaacaataacatgagaaaggctgatacacgatgaaggaagtcatcattgccacgaaaaacgaagggaaagtcagggaattcaaagcgatgcttgaaccgaggggctacgatgtcaaatctttactggacatcggctatacacccgaaatcgaagaaaccgggcagacttttgaagaaaacgctgtgattaaagcggaaacaatttcgaaagaaaccggaaaaatcgtgattgccgacgactccggcctgtctgtcgactatctcggcggcagccccggcgtatactcggcccgctatgcaggagaagagaaaaacgatctcgccaatctgaaaaagctattgaaagagctcgaaggggtggaaaaagaagaccgttccgcgaggttcagatgcgcgctcgcaatatgcattcccggacaggaaacgaaaacggtcgaaggttctgtggaagggtacattaccgaagagccgcgcggcacaaacggcttcggctacgacccggtttttctcgtcaaagacaaagatcaaacgatggccgagctctcaagcggcgaaaagaacaaaatcagccacagagcggaagcgctgaaaaagctgtccgctttattggatcaagcgtaaaggaggagggccgatcatgaaggttctgattgtcagcgacagccacggccttgaagacgaactggaaatgatcgctgagcggcacgggaaggaaacagatctcatcatccattgcggggattctgaattggacccttcccatcccgcgctttcctcttacttaacggtaaaaggaaactgcgatttttacggggagttcaaagacgaaatcgtcgttcccgccggatcgagaaagctttttttcacacacgggcatttatacggcattaaacagtcgcttttaaatgtgtactgccgggctgaagagctcggcgccgatatcatctgtttcggccattcccacatcgcgggaagcgagctgatggacggaaaactgctgatcaaccccggcagcatccgccttccgcgggtgcggaaagaaaaaacttatgctatactaaacattgacaaagacaatgcaacggttcgctattatgacttggacggccgggaagtcgaaagcctgacgaaccatgtacaattgccagcacattcatgaggaagaatttttttcttcctcgtgaagaaaaaaattctaaaaagttgttgactttatgtcccgatccgcatataataaatcttgtcgctgatagttaaagcgaaacaaaacaacatcatgtcccagtagctcagctggatagagcaacggccttctaagccgtcggtcgggagttcgaatctctcctgggacgtcacgtaatggggcgataaagcccgtcatcatacgctttctactcgttaaatgtaacggtcaatgtatcggtcaattaaaaaaccgacgcaattttgaaccgttcaatttaacgaagtaggaggcgttttttgttgacgaaaaagaaaccgattttcacaatcgacgaagatttttccgatttgactacggcgcagaagcctccggtaaatacgccgaaaaagcgagtgagggatcgaattaccatcgaaatgaaattatttgagagaaacaacaattaagtctgatggattcaggaatttatattggtccaagacggagagcctgcggacaccaaattgacgttgtatatacgtttattggtgtctaatttgtttttaggagggatttagcatgtcagctacacaactgactttttctgccgcctatagacgaaaaagaagtcagaaatacgattataagggagctaaaaagatataaggctttaaaggttcagcttgaaaaccggaaagaacgggaagcggccgggatgaataaccttttcccgcagctcagggatcagcactctttaaatgaattgaaagtttgtcagatggacagggcgcttaaacaaagccttgatggtgatgaattaaagatcataaaggccaagtatctctctccccaaaaaataaaggacattgagatttatatggagatggggttgaaaaaggacaaatgctatcaggtcaaacggcgggccatttacaatcttgcgacagctctcgggataatctgagggctgttgtgaacaaaaaagcagactcccaggagtccgctttatcaaagtgtacttttttaatcttaagggccgaactgaatcacgttatgatttaaccaaaaaacgcattttcagcaactttaaagtctccagtaccgaattcagcttttccttgagtagtaaagtttaaaataccagttaaaaatacacctgttattactgcacctaaaagtaattttttcatgagacaagttcctccgtccatgtttgaattttgtcgcgagcgactactccttcatcgaagtatttcgccgctaattcatgatattccttctttttgaagtgtcttgctgcaatgatagctaaatctgctacgtctgaccaaagctttttgtctcttagcatattcaatcctttatctaataaggtcttatccaactctttatatattgagtgtatgactaataacttggcttcgtacgttttttcgtttatttcttttgcgagattgagggctttttgataccaatgtgtcccttcttcgaataaacctttcttgaataaaacccttgccagcatataagaagttctgatgattgcgattttggaatgtagattttcaaaaatgtcgagagctatttcgaaggattcacgcgctaaatcgagtttttcttgtcgttcgtaagcaagaccgagattgtgatgtccgagtccctcaacgtaattttgtcgggtatcagcagccatttttattgcttttttatatacggactcagttaattcgtattgatgtagatccagtctgtttgccgcaattatcatttgagtggttgctgccctattttcataatttccaagggctaaaaagctttcgagcgctttttctgcgtgtgttaacgagaaaaaattttggtgaatttcataatatgcaatagcaatttgataattgaattctgctcgttctgcttcgtctggtattttatttatccaattttcagcaatgcgataaaaattaatggctttcgtaaagttctttatgtaaaactgatacagcccgatgaaaaagtaaaagtaatactgaagcatgtcgtccgtcttcttttcttcagctctatacttaagactttttaagatgctttcggattcgttatatttttcgatcaataatttataccgagaatctatcatattgaaataaagcaaaacatcttgattcttctccatattatcaatagccttctgaatttctttcttcatttgagttgctttatgaacttgctgtaacttaattgttgcataccattgattcaacatattcccgaccttttcggatcgtattttaacaaccaattcccaccattcctttcgtataattgatttgaaatattcaaaaaaataagtatccatttcctttttctgcatacctttcattttacagaaaggatcatttttttacaatgattttccttttttggaattcaaaaaaagcctgtcgactgtgttgggttttaagacctgatcaataagattcattttcatggatagacaggatttattcaccaatttctttccgtaaagtggtaaaatctatactgattgtaactttagtattagaggggaatgccatgaagactcttgatgtccatgcgttgcaccatgcaattgatcaaacgctggaacaattaaaacagcagtcagacgaattatccaaagtcaaaaaagccgtagagggcattacatcacttgatgatgctttaaaaggaaaaggcggcgacgcgatccgcgccttttacgaggaatgccacaccccttttctacagttctatgatactttcatagaggaatacagttccacgctgaagaaaatgaaaagcgcgctgaattcgctggaaccaaaccacaacgggtttatttcgcaaagctttcttgagcacgagctggaacaaggattgaatgcggccgaccgcactacgaagcgtttggtttctaaaacaaatgccacgatcgcaaaagtcagccacattgtcgatttgcctgatttgaatgacagcggttttcacgaacagaatcagaaagctttaaaggaaatcaatcagacaattgaaaagctgcacgccttcgaccgcgaacagacaagcgctcttaaaaccgctgaaaacgacctggaaacgatgcagagatacataagccggcttgaaaaaatgtacacaggccctaaaattgaaattaccggttaccaaaaaggctcgattttaaagccggatgagatggatgctttacgtggtggacaagacacagcgatgggcgtcatgttggataagctggataagagatcaaagcttgaaaaagaggccagcaaaatagaacctatgagtcatactgatacgttgaagaaaaaacttgaaaagttgtatgatgatccggatgagtttctcaaagttgctagagagattggatatgataatcttacatctgaacagatgaattatgttactgccattgaagaagcttatgagttcagagcagatccaattaaaggaactctggaagatggaaaacatgtcttagaaagtatgaaaggctttgtggttggaggatatgaatttgcaaaagatacgatccaaggaacgattgaaacaggtaaagctcttattggacaagcagacgactttattaaaaacccaaaagcaactgtaaattcagtacttgagtatgattacaaagccgctttcgaaagtatgttgcaatcaatcgcagattcgtgggacgaaaaaatggtacatggggattcatattctcgcggacactatattgcttatgcgattgggacgatatgggggttggcagaggccggtcctactgtcgtatcaggctcaaaaagtcttggcaaagctggcaaggctgcagcccaaacagcaaagaaaagtgttaactctgttaaacaacatttcagcccgcctaaaaatcgctatactcctgcattagaagggatgctccaaagagcgggagaggcccctaatgtgaaaaatacgcctttgctgaaggagctgcttgaggataaaaagaaaagtgtgcttttcaaatcaatcgataagaatggtgactttgtgggctccttaaaaggagaacagatccatctgaaaaatgtgaaagttaaagaaataagctatactaaaagagatcctgcagagacaaaaaaacttagaagcacttttaatggctctgttaaaaagaagtttttaaaaagcctagttaatgaccctcaaaaattgaaacagcttaagaacgccggtttgtctgattcagatatagcaagaatgcaggatggattaaatccaaaaggttggcaagttcatcataaacttccattagatgatgggggtacaaattctatggataacttaattttaatgaaaaacgatcctttccataaagcaattactaatgagcagaatgctttaacaagaggattgactcctggacaaacaaagaaaataaaaaactggccaataccaagtggggaaatttatcctattgaaaagtaacgggagggaagtcttaatgtggaaagcgcatttagaagagattcggaaaatagagaaaaaatatggagatgatctcaataaaccagcctctattgacgccataaaagaactggaacaaagcgttcaagaaaaattttatagtgcagtgctacctgagggatataaacagttcctcagcgctgtcaatggacttgattttaatgggttggtgatatatggggtagacagttctataagtgaacatgaagcagatgaagaaatacatggacttatagaaacaaatgaactttggcatgagaatgattggaaaaaaaagtatcttttctttggagattcagatgtctcattgtactgtctagacactgcccaagggaaatatttagaattagataagccttcaggaaccacaatgagcgaatacgaaaatttcaattcaatgttagaagaagcgttaagaacaagtctttcctgagcaattggcgccttttctctttttgtggtatatggattgtggggaaattctttagactatcaacatagttggccaagacacactacccgtaaatgcggaggttaattatgcagaatattcactggagaaagcgcagtacgtttaaagaggcaactcatgagcaaattcatagtcttgaagaaactcttaacattaaatttccattagattataaagaatacataaaagaatccaatggatgctctccagtagataaacgtgttgttgttattgcgggatttagagaatcgattaataacctgctaagcattagagacccagagaggccaattgatctttataaaacattcaataatgttaaggatagattagttgacaacattattccctttgcaactgatgcaggaggcaacttattttgctttgattatagaaattctgaaacaagcccaactgtggttttttgggatcacgaagaagcatttgagaatccagaagcagcggtaacctatgtctgtgataatttcactgaattaattaacagtctaagagagtatgaagaagaataaagggaagtttttttatgatgaatttaaatttttagaccatctttacgttggtatagccttctctggatagtagaaataattattaagcacttaactttggttgagtgctttttttatgttcaaagccgagaaaaatccgacaaaaagggggataaaatgggggactttttctactccactttgtcatacgatagagacaagaaaaacgaacgtgaatatcgagtccaagaaggagagcctgcggacactgatcatttgcacacggatgttgtgcagctgattggtggccgcttttttattggccagaatgggagacgcacctttcccttatcaagtgtgtacccggatgtatcgaatgatgatgaaggtcgtcagcttcacaggaggagcggctggagtctatgcaggattgcgcgcgatagtcgcggggaacgcaagcggtgagatcccgtttgcacaggaagtcatttttatatggctccctataatctttgcgtcctcatggaagaaaatccaaagactctcctggtttcagttgtaaattttgatgaggctgaggaaaaagcgctcaacctggctttaaataagatcagcggtgactgggatgattacaaacttgaacaggttttgatctatcccttacaggcttctcagaaagtgaaatagatgaaatcttgggagagctggctgagcatgaaggcaacggaggaaaaatcaatgacagccaggaattagacctggatgattatgaagatgaccatttccaacatacctgcccaaaatgcggattttcatttaatgaataggtgattacatggaaaagaaagaataccgttggaagttggccgatttaaaaaacatcaagaaaaatggccttaaagtattcagcacattttcttgcggcgggggttcctctatgggctataagctcgctggctacgatcttttggggaaatgtgagatcgatccgcaaatgatgaagatttacaggaagaatcataacccgaaatatccttttcttatggacatcagagactttaacaaaatggaaaatctgcctgatgaattgttcgatttagatatttttgatggttccccgccctgcagcgtgttttctattgcgggggatcgggaaaaggcttggggaaaagaaaaagcctttcgtgaaggacaggcaaaacagtcacttgatgatctattttttcattaccttgatgctgttgaaaggctgcggccaaaaatctttgtggccgagaatgtcaaaggaatggtcagtggaaatgcaaaaggttatgtgaagctggtgattgaacgagccaaggaaattggatatgatgttcaactgttcttgttgaatgctgccacaatgggagtcccgcaacgtagagagcgggtcttttttattggccgaaggaaggacttgaatttactaccgtttaaattgtccttcaatgagccaccgattgtatataaagaattcagaagcggccatggtgcaaggcttaaagaaatatcaaagctttataaaagatgggtgaagcgacggccgtcggataataatgggagacatcacgaaaaggattgaagggaaagaatctaatttcaatacgatattagtgaaaaatagccttgtcccgcctactctcgggagtggttcggtatttgtccgttatgatgagccctactatatctctgaacgggatatcattttaatgcaatctttcccactcgattatgattttatggacgcatctgttcaatatgtttgtgggatgagtgttcctccggtcatgatgaaaaaaatatcggaacagatttacaatcagtggttttaataattctcactacatttagaaaaatgttattatttttctaaaaagggtggaatatatgaccgttgtgccggagaaattgtactgtagagcttgtaagagaaaaacaaaccatcagatagttaaaaatgagcatgacaatgaactaaagtattcaataagtaatttagattatgatgaagaaattgattttcaatttaatgaggattatgcaatagttcaatgtagaggttgtgacgctattgcttttctaaaaatatacggcgatgaagatatgtttcatatagtcggttcaaattatcatactgatagagaatactttgtcgaatacactgtctttccagaagagccaaaaaaggaggatccggtagaacagttattacaattcaaagaaaaatatgaattcgatcacttacctaacttaataaatggaattagaaatgaaacaattaatgcttatcgccaacgtatgaatttattatgcaatacgggaattagaatgcttattgaatcaatatgtatggtaaatggaattgataaaagaccgaagattaagaagggagaaccagtgttagatggtgataaaaacccggtaatggtcaatttaaatttggttcaaaagataaatgaacttaaagaaaagaatataattgatgaggaacaacgaaggatactcttggaaattaaagatgtaggaaatcagacagtacatgaaatatttcgaccgaaacggagagatttattgttatatctagaaacattagatttaatactatttaatatttatgaattacctcatattaaaataacaaattcaccaagccctagttagggcttatttttataaagagggtgctgacaacaccctcccttacccaaggccatcaccctggtaagagcgtgatgaagacgcggccgcgtttcgtgggaaaatcacgctctcatctctattctattggaggaccaggcaaatggcaatataaaatacaaacatacgttcctgcgatgataaagaaaaagagaaactgcttctcctgcatagcgctgaattgcttgaaaacatcagtcaatctaaagagaaatatcgaaaaattattcaggcaggtatcacccaatgggtcaaagattttcaaagcggccatattaaggtgaacactgttgaagatttaaaaaagctcatcgagctcgatatacagctgcagaaagatgaagaaatttaaaaacaaactcaaactcaattcaggttgcggaggtgggtgaaatgtaatggcgagaccgcgtgatccaagacgtgacgaagcgttccgtttatggaaagaaagcagcggaaccaagaaattaaaagacatcgcagatgaattgggcgtctcaagcagtaccgtccgcaagtggaaagcaatagataaatgggaagataaaatcaaagggagcgctcctaaatcgaatgggagcgctccttttcgtcccggtgctccaataggcaataaaaacgccaaaggaaacaagggcgggaatgcaccgcctggaaacgaaaatgcgaaagggaatgccgcaccaaaaggaaataaaaattccgcccgtaccggcgaatatgaaacgatcatgtgggattttttaaacgaggatgagagacagctgttcggagaaatcgaaacggacccactctttcaaattgacttaacgatcagggaattgagccttcgggagcggagaatgatgcagcggatcagtcggatagaaaacggcctatctgaaaaacagcgccgcgtgctgcaacaaatgcgcaaggtcaaggacatcgttcaaaccccggataagaatggactagtcaaacccgtcccggttatgaatgagcgtcttgttgtgactgaaattgaagaaaccgagatgcgggctattgatgatattttgaatatcgaggaggcactcacccgggtaacggataagcgattgaaggtcattcgccagaaatacgatatgatccgcttaatggatgagcaggaactgaagcttcgaggcatctatctttccaatgagacaaaacaggcagagcttgaacgccttaccgcccgccctgtggacaattctgtgaatatcacaattactcgtaagggtgacggcaaatgacggtaaaagaagtcaatccgcattttgaagattttctctttgactggaaccaaaaatttcagctgctcgttggcggttacggatcatccaaaagctatcacattgctctcaagctcattttgaagcttcttgaagaaaaacggacagtcttagtcattcgtgaagtgtacgacactcatcgggattctacattctctctttttgaagggatcatcaatgacttagagattgatcatattgtgaggtgtatgacatctccgatgcaagtcaggttcccaaatggcagccggatcatcttcaaggggctggacaaaccggccaaactgaaatcgatcaacaacatctcaataatatggattgaggaatgttcagaggtcaaatatgaaggctttaaagagcttctcggccgtctgcggcatcctacgctgccgcttcatatgattttttccacgaacccggtcggggaagacaactggacgtataagcatttctttaaagacgatctgaataatcgatttgtcctggatgataaagagctttatgaaaagcgaacgatcgttttaaatgacacatactatcatcattccacggcggaagataatttgtttctgccagaaagctatgtaaggcagctggatgaactgaaagaatacgatccagacctttaccgcatcgccaggaaaggtcattttggcgtgaatggggttcgggtttttcctcagcttgaagagtggccacacgatgaagtaatgcaggccgtctcgaacattgactgccccatcaagcgggtaggaatggactttggttttgaagaatcctataacgccgttgtccggcttgcggtggatcataagaaaaagtacctctatatctattgggagtattacaaaagaggaatgacggatgacaggacagcagaggagctccaagaatttaagaacacccaagagcttatcaaagctgattcagcggagcctaaaacgattcagtatttccgacagcatggtttcaatatggtgggagctcataagtaccagggttcgcgcctgcagtatacgaaaaagatcaagcggtttaaaaagatcatttgttccgaccaatgcaagaacaccatttttgaactcaagccgctgacctataaaaaggacaagctgggtaacatcattgaagatgaattcaagatcgatccccacactctttcggccatctggtatgccctcgatgattacgaggtcaccgatctgaaggagaaaccgaaaatccggcagcggccaaatagagagaggaggtaaagcatggctcaacaatctgtgaaagccaccgtgttcaaggcaaatgccccaagtgaaacgaccaaacagatttacgaagatcaattcgactataaaggaaatgacatcatcgagccgccttatagtttgaaggaattgaaaagcaccgcagagtattcaacgatcctgcagcagtgcatccatgcctataagaccaaatattctcggttttggttttgatgtagagtacacctttgatattaacggagatgatgtaaaacctggattttgcttttggcaacaggggaacgaatgtccactttttaaacttacgaattaattggaaaattgggagcgagcggggagcggattcgctcccaatcaggtatttttcgttcctccagaaaacaaaaaagagcaaagaaccttgatatcatgggctttcggttaagtggtgtcacatgctgtccataagggtcatcggccttctaagccatcggtctggagttcgaatctcccctgggacgtcactgaaaaaagcctcaaacttcttggcatacaagggtttgaggcttttggtgttgcaaaacaacaacatcctaaaaattccctttcatcatttcaaacaaaatgaaaaagctaaagggtgtgatcaattttaaggaggatgttgtaatgacaaaacaacagcaaaatcagcagcaaaagcagaagcaacaaaaacaaaagcatgagcagctgctcggggccaacatcacagataccgaacttgctcaggaattcggaaatatccagcagcagcttgcccagctggagcaaactgttaatcaaatggggtcacagcagcagggccaaagcggccagcagagctctcaattgagccagggaatcaatcagctgaaacagcaaattcagcagttcagctcccaatctcagcagcaaatgcagcagacggatcagcaaattcagcaaagcattcagcaggctgtccagcagctgaatcaggctcttcaagggatccagacaaaccaggccatgaaccaaatgagccaggcgcttcagcaggcgcagcagtcatttaaccagcaagggcagcaaggacaacagggtcagcaaaatcaacaaaaccagcagcaaaatcaaaattttcaacagcctctacaataaaaagctgtaaagagccgtttagcacggctcttttttatatcggtcattcctcgttttgatcctcttcgtcatgggttggatgcgctccgggatattgacgcggcgttccttgatgaagattgcggaattcgtatgcgaaattgctgtagtattgctggccttccttccatggcgtgcttttgttctcaacgggctcgtctttgccctgtgcagctccatacgcaccttcaggaaattcttcagctgttaaaaagtttctttgcgtttcaacgttcgaaatttcttttttgtcgtccatcagatcacccctgttttagttttattgttgccatgaaaaaggggagctatgtgttttcgttttgtatgcagtaggtttcattttaaaaacgggataagatgctcattctctgccgggagtacaaggggggaaatgcgccgatcacaaagaaaatagacattttgtacagaaagaacctgtcagataaagtggtattttatggtttattggtccttttctcctcagcttttaagagctgtccttctatcttatgacccgtctattctcgctttttgttatacatctcaattcagcaatggttttatctgttttccagattgatgtaaatggggcattggttgtaaaatttaccatgagagaaaatcttacaatgttcgttctgcttttattttagaaagggagctgaaaaaaggtgcatacgctagaaaaaatggagcaaacaaatttccagacggcgagagattatgtgacacaagcatacgagacagtacagaagcgaaatttttacgaaagcgaatttcttcaagctgtaaaggaaatatttgattcccttgtccctgtattggcaaggcatccaaagtatatcgaacaccgcattcttgagaggatcgcagagccggaacggatgatcaccttcagggtgccgtgggtcgatgatgaaggcaatatccgggttaaccgagggttccgggttcaatttaacagtgcaatcggtccgtataaaggcggcatccgctttcacccttctgtgaacgcgagcattattaaatttttgggttttgagcagatttttaaaaattctttgaccggactgccgatcggaggcggaaaaggcggggctgattttgatccgaagggcaaatcggacagggagattatgagttttacgcagagcttcatgaatgaactgtacagacatatcggaccggacacggatatccctgccggcgatattggtgtcggagcaagggaagtcgggtttatgttcggacagtataaaaagattcggggccgctatgatgcaggcgtgttaacaggcaaaggccttgaatacgggggcagtttaacgaggaaagaagcgacagggtacggtctggtttatttcgtggaagaaatgctgaaggatcaggggctgcgctttgaaaacagcaccgttgtcgtctccggttcagggaatgtggcgctgtacgcgatggaaaaagccgctcaattcggtgcgaaagtggtggcctgcagcgattctgacggctatgtctatgacgaaaaaggcatctgtcttgagacggtgaagcggctcaaagaagacgggaacggaaggattcgcgagtatgtcagcgagcatccggaagcacactatttcgagggatgtaccggcatttggtctattccatgcgatatcgcgcttccgtgcgcgacccagaacgaaattgacgaagaggcggccgaagtgctcatttcaaatggggtcaaagctgtcggagaaggagcaaatatgccgtctgaagagggcgccgtcaaacgctttttggatgcgggagttctattcggaccggctaaggctgcaaatgccggcggtgtagccgtttcagcgctcgaaatggcgcagaacagcgcacggcttcactggacggcggaagaaacggatgcgaagctcagggcgatcatggctgatatttacaagagaagcgttgaagcggcttcagaatacggacggcccggaaatctgctcgacggctgcaatatagccggatttatcaaagtggcggatgcgatgatcgctcagggagtcgtttaacggtaaaaagagagagcatgatgccctctctttttttgtgctttattcattgtctctgaatccaccggtaaaggcgtgtacagccggaacggaaattcccgggtagccgatgccgaatccgagcgtcggagtggtgaacaccccgccgtacggataataggtatatggcccgtgtgctgaaggattatagacataagtaaccgggtagccgaagtatcccgggtattggcgcacgcggggaacagagtgcgcaggaaatgtgcggtacatcatattcacctgtttctttttgattaacaccagtttatgtaaaaaatcgtaaaatggagtctgtacatatatgtggcaaaaaatctaaccggcggggatgaaattataaaaaattgtcgggataaaatctaacaaaactgtataaaacgccagtttttttatgtaatctttatagattacataaaaaattttaaattgtttttcaattttacatttccttttatatcaatcatgtaagcgtatacaaatagattgattaatcaaaattgtctaataattttaaaaaatacggttgacactgtatgtaaaggggcgtaatatgagttcaaacaaaagaacaaatcacttgaaaacttttcatctttcccgggaatgacagcgggaaaacgggttcccgcatcatgaatttttaatcgtttaaagcgttcatttacaacagaaaggtgtgcttgagggatgggggaccagaaagaccagtggatcttcctaaacgacaaactcgttaaaaaagaagacgctaaaatatcagtctatgatcacggatttttatacggggacggcgtgtttgaagggatcagggtatacgacggcaacatcttcagaatgcaagagcacatggaccgcctctacgattctgcgagatcgatcatgctggagattccatatccacaggaagaactgacacagcacgtactcaaaacagtcgaaaaaaacgggctgaaagacgcttacatccgcttggtcgtttcaagaggagcaggtgacctcggactcgatccaaacaattgttcaaacccgagtgtcatcataattgtcgaaccattggcaatattcccgaaacatttatatgaaacggggattgacattgttacggttccgacaagaaggaacagacccgatgtgctgagccctaaagtaaaatcgctgaactacttaaacaatattcttgtccggatcgaggcgcatatggcgggtgtgacggaagcgctcatgctcaatgatcaaggctatgtcgccgaagggtctgcggataacgtatttatttataaaaacggaaagctcttgacgcctccgggctatatcggagcgcttgaaggaatcacccggaatgccatcatcgaaatagcgcgagagctcggctatgaagtgaaagaagagccgtttacccgccatgacgtatacacagccgaggaagtgtttttaaccggaacggctgcagaagtcatcgcggtcgtaaaagttgacggccgcaagatcggggacggcaaaccgggagtccacacaaaccggatgcttgaaaagttccgcgagcgcgtcgtccgtgaagggttaaaagtcagcctcaaagatcaaagcttaagtgtcagctgaataaagataaacgttgaagaggataagtagcagcggaaacgccgcctgcagagagccgggattgctgggaaccggtgacggcctccgcttgtgaactcccctctgagtgtcagtctgaacgatttccatgtttagtagggctggccgggtgaacattacgaaggttcactcgttattaaaccggataagcgattatccataaggcggctttcaaaagccgcgaacaagggtggtaccgcggaaagaaaagccttttcgcccctttggcctgcaaggtgtgcagcgtcaacagtgggcgggaaggctttttttagctgcaaaagcagattggatacatgctttgcggcacatatatattgattattttttgaaaaacaattgtgaatgaacagtgatgatgatcacttgataaggaggaagaaaaatggggacgaatgtacagttggatgctgaaaatgcccaatgtacacaaacaatggcaggggcgtcaatgctgatcgaggctttaaaacaggaaaatgttgaagtgatctacgggtatccgggcggtgcggtcctgccgatttatgacaaactctacggatcgggaatgtttcatgtgctgacgcgccatgaacaaggcgccatccacgcagccgaaggatatgcaaggatttccgggaaaccgggtgtcgtcatcgctacatccggaccgggagcgaccaaccttgtaacgggtctggccgacgcgatgatcgattcattgcctctcgtcgtattcaccggtcaggttgcgacatcggttatcggatctgacgcattccaagaagcggacgtcatcggaattacgatgccgattacaaagcacagctaccaggtacgcaatgccgaagatttgccgagaattattaaagaagcattccatatcgcaacaacaggaagaccgggccccgttttaatcgatattcctaaagacatcgccgttgtagaaggagaattccgctatgaccacgacattcaccttccgggctatcagccgacgaaggaaccgaattatctgcagatcagaaagcttgtggaagcggtcagtgcagcgaaaaagccggttattttagcgggtgcgggcgtcttgcacgggaaagcgtcagaagaattaaaaaattatgtcgaacagcagcagattccggtggcacatacgctgttaggcttgggaggatttccggccgatcatccgcttttcctcgggatggccggaatgcacggaacgtatgcggccaacatggctctgtatgaaagcgatctgttaatcagcatcggtgccaggtttgatgaccgggtcacagggaacttgaagcattttgcaaaatatgcgaaagtcgctcacattgacatcgatccggctgaaatcggcaaaaacgttcatacgcacattccggttgtcggcgacagcaagcttgtactgacggagctgatcaagcaaaacggcaagccgagcgcttctgatgagtggaaaaagcagcttgcggcatggaaaaccgaatatccgctctggtatgaagaaaatgaaacagaaggattcaaaccgcagaagctgatcgaatatatccaccgctatacaaagggcgaagctattgtaacaacagacgtcggacagcatcaaatgtgggccgcgcaattttatcagttccaaaaagccgacagatgggtcacttccggcgggctcggcacaatgggcttcggacttccggcggcaatcggagcacagcttgcggataaggatgcgacggttgtatcgatactcggcgacggaggattccagatgacgctgcaggagctgtctgttattcacgatctgaaccttccgatcaaggtcgtggtcttaaacaaccgctgcctcggaatggtccggcaatggcaggaaatcttttacgatgagcgctattcgcactccaagttcacatcacagcctgatttcatcaagctgtctgaagcttacggcatcaaaggcgtccgaatcacatccgaagaagaagcggaagaaaagctggaagcggcgctaacgtcgaatgaaccgatggtcattgatgttcaagttgcacaagctgaaaaagtatttccaatggttgcgcctggaaaagggctgcacgaaatggtgggggtgaaaccttgaaaagaatcatcacgctgacggttttgaaccaaagcggcgtcttaaacagaatcacagggttgtttacaaaacggcattacaacattgaaagcattacggtcggccacaccgaaaccgcgggaatttccagaatcacgtttgtcgttcatgtggcagatgaaaaagaaacggaacagctgacaaaacaattaaacaagcagattgatgtactgaaagtcacggacattacgaatcaatcgatcgtccaaagagagctggcgttaatcagggtggtttcccctccgtcgagcaggacggaaataaacggcgtcatcgaaccgtttcgggcgtctgtcgtcgatgtcgcaaaagacagcgtcgtgattcaagtgacaggggaatcgagcaagatcgaagccctgatcgaactattgaaaccatacgggattaaagaggtagccagaacaggcaccacggcctttgcgaggggaactcagcaaaagccggcctctattaaaacaatatctattgtataaatcataaaaagggagagattgaaatggtaaaagtatattataacggtgatatcaaagaaaacgtattagcaggcaaaaaagtagcggtgatcggatacggctcacaaggccatgcgcacgcactgaacctgaaagaaagcggagtggacgtcattgtcggcgtcagaaaagggaaatcctttgcaaaagcagaggaagacggccatcaagttttcacggtaagagaagcggcagaacaggccgacatcgtcatggtgcttcttccggatgaacagcagcaaaaagtgtatgaagcggaaattaaagacggacttcaagctggcaattcacttgtattcgcccacggattcaacgttcatttccatcagatcgtgcctccggcggatgttgacgtattccttgtcgctcctaaaggaccgggacatcttgtcagaagaacgtttgaacaaggtgcgggggttccggcgctgtttgcgatctatcaggatgtgacaggggaagcgaaagacaaagcccttgcttatgctaaagcgatcggcggcgcaagagccggtgttcttgaaacaacatttaaagaagaaactgaaaccgatcttttcggagaacaggcggtgctgtgcggaggattgacttcccttgtcaaagccgggttcgaaacgctgacagaagcgggctatcagcctgaactcgcatacttcgagtgtctgcacgagctgaagctcatcgtcgacttgatgtatgaagaaggtttggcagggatgagatattcgatttccgacacagcgcagtggggagacttcgtatcaggtccgcgcgttgtcgatgagaaggtaaaagaatcaatgaaagaagtattgaaagacatccaaaacggtacattcgcaaaagagtggatcgtcgaaaaccaagtcaaccgtccgcgtttcaacgccatcaatgcaagcgaaaacgaacaccaaatcgaagtggtcggcagaaagcttcgcgaaatgatgccgtttgtcaagcagggcaagaaaaaggaagcggtggtagccggtgcgaaaaattaacttttttgatacgacactccgtgacggtgaacagtcgccgggcgttaatttaaacacgcaggagaagctggcgatcgcccagcagcttgaaaaactcggggtcaacattatggaagcgggctttcccgcttcatcccccggggatttcaatgcagtaaaagaaatcgcaaggacgattaaaaactgttcggtaacagggcttgcccgctctgtcaaaggagatatcgactcggcgtgggaagcgctcaaagacggagctgaaccaaggcttcacatttttatcgccacttctgacatccacttaaaatataagctgaaaaaaacgcgcgaacaggttctggaacaggcggtcgcaatggtgaaatacgccaaagaacgcttcccgatcgtccagtggtctgccgaagatgcgtgccggactgatcttccgtttttagccgagattgtaagcgaagtgatcgccgcgggagcggatgtcgtcaatctgccggatacggtcggttatttagcgcctgccgagtatggaaatatcttccgctatattaaagaaaatgcccgcaatgccgacaaagtccagctttcagcccattgccacgatgacttgggcatggctgtcgccaactctttggctgcgattgaaaacggagcggatcaagtcgaatcggtcatcaacggcataggcgaaagagcggggaacgcctcgcttgaagaaatcgccgtcgccctccatatccgaaaagatttctaccaggcggaatcaacgattcagctgaatgagattaaacggacaagtgatttagtgagcaagctgaccggcatggccgtgccgcggaacaaagcggttgtcggcgataatgcctttgcccacgaatcaggcattcaccaggacggcttcttaaaagaaaaaacaacatatgaaattatttctccggaacttgtcggcgtgaaaacggatgcgcttgtgctcggaaagcattcagggcgccacgcatttaaagataagctgcaaaacctcggattccagcttggagaagaagaaatcaataaattcttcaacatttttaaagagcttaccggaaagaaaaaggaatttacggatgaagatctcatctcgctgatactcgaagagaaaacggcagaccgcaaaatcggctatgattttatttcactgcaggttcattacggcacctcccaggttccgacagcaacagtctcccttaaagatcaggaaacggatcaggtcatccaggaagcggcgaccggagcgggaagcgttgaagcggtgtacaacacgctgaagcgctgtatggataaagaagtccagctccttgattaccggattcaatccaaccgcaagggacaggatgcattcgcgcaagtatacgtcagggtgatgatcgatggaaaagaatcgggaggacgcggggttgcccaggatgttctcgaagcatctgccaaagcctacttgaatgctgtgaaccgctatctcgtattgaagacgaatacggaaggattgtcaaaacaggcggctgtaggatcataacagtaagaaggaaggagtttgttgaatttgaaaaaacgaatcgcacttttgcccggtgacggaattggtcccgaagtattggacgcggctgttgatgtgctgaaaagcgttgctgaacattatcagcatgaattcgaatttgaatacggcctgatcggcggggcggcaattgatgaggcaggagcgccgcttcctgaggaaactgtcgccgcctgcaaagctgcggacgccattttgctcggagctgtaggcgggccgaaatgggatcaaaatccttctgagctgcggcctgaaaaagggctgctcgccatccgcaagcagctcgatctttttgccaatctgcggcctgttaaagtatttgaaagccttgcgggagcttctccgttaaaaaccgaatatatcgaaggtgttgactttgtcatcgttcgcgagctgacgggcggcttgtattttggaaagccgagcgagcagtacgtcaatcagaacggcgaggaagaagcggttgacacgctgttttataaaaagtcggaaatggaaagggtcatcagggaagccttccaaatggcgcagagtcgaaaaggcaaagtgacctccgttgataaagccaacgttcttgagtcaagcaaactatggcgcaagacggcggaagaagtggcgaaagagtttcctgacgtcaagcttgagcacatgctcgtcgacaatgcagccatgcagctcatctatgcgcctggacagtttgatattatcgtgacagaaaacatgttcggcgatattttaagcgatgaagcatcgatgctgaccggatcgctcggcatgctgccgtcggccagcttatcaagctctggacttcatttatacgaacctgtgcacggctcggctcctgatatcgcgggacagaacattgccaatccgcttgcggcgatcttgtccgcggctatgatgctcaggacgtcattcggtcttgaagctgaagcgcaagctgttgaacatgcagtcgatcaagttctccgggcaggaaaacggacgaaggacctggcaaaaggctcggaacattgcacaactcaatcgattacaggggaagtaaaagccgcgctggcagacgacaatgccatttcaaacatcatgaccgcttacgtttaaggaaaatggatattggtagagggaggaagaaagatgatgcctcgaacgatcatcgaaaaaatttgggatcaacacgtgattaaaaaaggtgaagggaagcctgaccttctctatatcgatctgcatctgatacatgaggtaacgtcgcctcaggcctttgaaggcctgaggcaaaagaacagaaaagtcagacggcctcaaaatacgtttgccacgatggaccacaacattccgactgtcaatcggtttgagattaaagatgatgtcgctaaacggcaggtcagtgcgctcgaacggaattgcgaagaattcggcatccgccttgcagacttgtcaagcgtagaccaggggatcgtccatgtcatcgggcctgaactgggattgacgctcccgggcaaaacgatcgtttgcggagacagccatacatccacacacggagcgtttggcgcgctcgctttcggaatcggaacgagcgaagtcgaacacgtcttgtcaacgcagacgctttggcagcaaaaaccgaagacgctggaaatccgcgttgacggcaaactgcaaaaaggagtgacggctaaagacgtcattctggcgatcatcggaaaatacggggttaaattcggtgcgggctatgtcattgaatataccggcgaagtgttccgagacatgtcgatggacgaacggatgacggtttgcaacatgtcaatcgaagctggggcaagagctggattgattgcaccggatgagacgacgtttgaatatgtcaaaacaaaaaaatatgcgccaaaaggcgaggattttgagaaagctgtagaagaatggaagaacctgaaaaccgatccgggggcggtctacgaccggacgatcgtgatggacggaagcgccatttctccgatggtgacgtggggcatcaaccctggcatggtgctgccggttgatgaaacgattccggggcctgaggctttcttgcaggaagacgataaaaaagaagcgcagcgcgcatatgaatatatgggtcttgaaccatataaaaaaatcgaggacattacaattgagcatgtctttatcggttcatgcaccaactcgcgtatgacagatcttcgccaggcggccgaaatgattaaaggtcaaaaagtcgccgacggcgtcagagcgatcgtcgtacccggctcgcaaagcgtcaaaatccaagcggaaaaagaagggcttcacaagattttcatcgaagcgggctttgaatggagagaatcgggatgcagcatgtgtttgagcatgaacaatgatgttgtccctgaaggagagcgctgcgcttcgacttccaaccgcaattttgaaggcaggcagggcaaaggagccagaacgcatctcgtcagcccggcgatggctgcgatggccgcgattcacggccgctttgtcgatgtcagaaaatattaccaagagacaacagctgtatagaggagtgacaagatggagccattaaagacccataacggaatagcggcggtgctaaacagaatcaacgtagacacggaccagatcattccgaagcaatttttaaaaaggatcgaaagaacgggatacggccgttttgctttctttgactggcgctatctggataacggcgatcccaatcctgattttgaactgaaccggccggaatacaaaggcgcttcgattttaatcgccggcgaaaacttcggctgcggctcttcaagggaacacgcgccatgggcgcttgacgactacggatttaaaatcattatcgcgccgtcttttgccgatatctttcaccaaaactgttttaaaaacggcatgctgccgatccgccttccttatgaggcgtggaaagagcttgctgaacagtatgagtatcaatctttgacgatgacggtcgatctcgaaaaacagacgataacagatcatgccgggcggcagattgcctttgaggtcgatccgcattggaaagagatgctgctgaacggttacgacgaaatttctttaacattgctccttgaagaagaaatcgaacaatttgagaaacagagaagttcttggctgcaagcataaaaaagctgtccgatgtagatcggaggctttttttgctggcggcagcatactgccgccggttctttcttgtgtttagcgggccgggttgatacacttgttaaaaaataagtgcctgaaaggaacttagaaatgaagcatgacaagaagaactcgaagatcataccgttcccgaacgtaaaggagcgtttagtgcacaaagggatgggtgcgctcaaagaaaagaattaccatgaagcgctcaggctgttttctgaagcgaagcgctatgatgatgaggaatctgatatttatctgggaatggccatctgcctgcttgaaatcggcgagcttgaagaagcgaaaggcatctgcgaaaaaatgctgaaggaaggccacggccactattttaccgttttgcaagtctatatgacgattttaatccagctcagacaatacgaaaaagttaaagaaacgatcgaagctgtactcgaagaaaacaagcttcctcctgaaagcgcggaacagttttataaactgcttgatttcagccgcaagatgacggaagacccggggcctgaggacatcaccgaagaccttcccgagacggaggaggttgatcaggaaaggcttttgaatgacacggaagagcaggttaagcttcttcacgggctgaaggaccgcaatctgacaagctatatcggcttgttgaaaacgattctgcaaaatccgagcgcacatcctgtcgtaaaaacgatgattcttcagcttttagccgagtcagaccatgaaaagccgacgcttgtcgcaaaatttggcgattcgatgacaattaatccgacagagacggtcaagcctgatgacatgccgatattaaagcatgttctgagcgtgctcgatgatacgctggggaatgaaaatcccacgctgtaccaggcggtcgaagagctgtggagaaggcatatttacgtcctctatccgtttcagccgaaatactcaaaccgcgagctctgggctgctgcactgcataaagtcggatatgagatgcacgggatcgacatcgataaagaggagcttcatattctctatgaattcaatgacagacagcttgacgaagcctgcgcgctgatcaaagacatagaagaaatttcttatttgtaaatgttgaaagcagcaggcattgtgttataatatagtggttgcatttgtgaaaaacggaagttgatccgtttgccgctaaagattcattatttatctttgtatacataatgatggctgtcagaaacacatgagctgcactcagtcggcagcttgcgatggacgtagccgtttgcttgttttaaaatggaaaaccgacacaacctgaatagattttggagggaaacacatgtcagtaaaatgggaaaagcaagaaggaaacgaaggcgttttaacggttgaggtagatgccgatacctttaataaagcccttgatgatgcatttaaaaaagtagtaaagcaagtatccattcctggattccgcaaagggaaagtgccgcgcggtttgtttgaacagcgttttggcgtagaggcgctttatcaggatgcgctggacatcctgcttcctgtcgaatatccgaaagcggtagaggaagcaggcattgagcctgttgaccgtccggaaatcgatgtggaaaaaatcgaaaaaggcgaaaacctgatcttcactgcgaaggtaacggttaagcctgaagtgaaacttggcgaatacaaaggccttggcattgaaaaagacgatactgccgtaacggatgaggacgttcaaaacgaacttaagtctctccaagagcgccaggctgaactcgttgtaaaagaagacggcaaagttgaagaaggggacactgttgttcttgacttcgaaggattcgtagacggcgaagcattcgaaggcggaaaagcggaaaactattcccttgaagtcggttcaggctctttcatcccgggctttgaagatcagcttgtcggacttgaagccggtgctgaaaaagacgttgaagtgacattcccagaggaataccacgcggaagagcttgcgggcaaacctgcggtattcaaagtgaaaattcacgaaatcaaagcgaaggagcttcctgagcttgatgacgagtttgcaaaagatgtcgacgaggaagttgaaacgcttgccgagctgactgaaaaaacgaaaaaacgtctcgaagaagcaaaggaaaacgaagcggacgctaaacttcgcgaagagcttgtcttgaaagcagctgaaaacgctgaggctgacattcctcaagcgatgatcgacacagagcttgaccgcatgatgaaagaattcgaacagcgtcttcaaatgcagggcatgaaccttgagctttacttccaattctcaggacaggatgaaaacgcgctgaaagagcaaatgaaagaggatgctgaaaaacgcgtgaaatccaacctgacactggaagcgatcgccaaagcggaaaaccttcaagtcactgacgaagaagtcgaagaagagctttctaaaatggctgaagcatacaacatgcctgttgaaaacatcaaacaagcaatcggttctacagacggaatgaaagaggacttaaaagttcgcaaagcaattgattttcttgtagaaaaccgttaatatgtttcataatcatactttatataaaacagggcgcgaatgtttcgtgccttgttttatacaattttgacttatcatcttttctttgggaaaggatagataatgtcgttttgatcaacatacatattgaatatgccggacggcaaacacaacgttatcgcctttttggaaagtgtggtaaaatgcaatacataatggaacgaatgttttcaagcgatgtttcttttaacgaagaaacaggaatgacaaggatataaggggtgaaagaatgtttaaattcaacgaggaaaaaggacaattgaaatgctcgttttgcggtaaaacacaagatcaggtacgcaagcttgtcgccggaccaggcgtatatatatgtgacgagtgcatcgaactttgcactgaaattgtagaagaggaactcggctctgaagaagaagtggagttcaaagatgttccgaagccaaaggaaatccgcgagattcttgatgaatacgtcatcggccaggaccaggcaaaaaaatcccttgccgtggccgtctacaatcattacaagcggatcaattcgaacagcaaagtcgacgacgtcgagctgtcaaaaagtaacatttccatgatcggaccgactggaagcggaaaaacgcttcttgctcaaacgcttgcccgcatcctgaatgtgccgttcgccattgcggatgccacgtcgcttactgaagcaggctatgtcggtgaagatgtggagaacattttgcttaagctgatccaggcagctgactacgatgttgaaaaagcggaaaaaggcattatctacatcgatgaaatcgataaagtggccagaaagtccgagaacccttcgattacacgcgatgtatcaggcgaaggcgttcagcaggcattgcttaaaattcttgaaggtacggttgccagcgttcctccacaaggcggaagaaagcatcctcatcaagagttcatccaaattgacacaaccaacatcctgttcatttgcggcggagcttttgacggaatcgagcagatcatcaagcgccgtctcggccagaaggtcatcggcttcggctctgacaacaagcatgaagaccttgaaaaagaagcgcttctttccaaagtgcttccggaagacttgcttcgcttcgggctgatccctgaattcatcggccgtctcccgatcatcgcaagccttgagccgctggatgaaaaagcgctggttgaaattttaacaaaaccgaaaaacgcgcttgttaaacaatatagaaaaatgcttgaattggatgatgtggagcttgtgtttgaagacgaagcgctcacagaaatcgctaaaaaagcaattgaacgtaaaacaggagcacgcggacttcgttccattatcgaaggaatcatgctcgacgtgatgtttgatctgccgtctcgcgaggatattgaaaaatgcgtgatcacaggcaaaaccgtcactgacggcgaaccgccgcgtctcattatgaaagacggcacggtcgtcaataaagacaaaaaaacttcagcataatgcagagaacctcctggcctaaaggaggttctttttttgcatccggaaaccgtcggcatcccggagcagagtgacggcttcaaaagcaaaataatccctttctgtacgtttattccctccctgatcaggaaatactatctgacatactaaagatacgaaaccatttcaggagggaccatcagttgagctggacgagcattgcactttttgtacaactatttttcgggatcatcatcggattatatttttggaatttgctcaaaaatcaaagaacccaaaaggttacgatagacagagagtccaaaaaagagatggaacagctccggaaaatgagatcaatccatttatcagaacctttatcggaaaaggtgaggccgacggcttttaaagacatcgtcggccaggaggacggcattaaagcgctgaaagccgccctttgcggaccgaatccgcagcatgtcattatttacggccctccaggtgtgggaaaaacggcagctgcaaggcttgtccttgaagaagcgaaaaagaacaagcgctcaccgttccaggaacattccgcctttgtcgagcttgacgcgacaacggcccgtttcgacgagcggggaatcgccgacccgttgatcggttcggtccacgatccgatttatcagggcgccggagcgatggggcaggccggaattccccagccaaagcagggagccgtcacgcatgcacacggtggagtattattcatcgatgaaatcggagagcttcatccgattcaaatgaataaaatgctgaaggtgctcgaagatcggaaagtttttttggaaagcgcctattacagtgaagaaaacacgcaaatccccaagcatattcacgacatttttcaaaacgggctgccggcggatttcagactgatcggcgcgacgacaaggatgcctgatgaaatcccgcctgccattcggtcgagatgtttggaagtgttcttccgcgaccttgaaaagcacgaattaaaaacggtcgccaaaaaagcggcagataagattcaaaagaaagtcgcagaggaaggactcgacctgttgacgcggtatgcgagaaacggccgcgaagtcgtcaatatgatgcaaatcgccgccggaatggctttgactgaagagcgcgacgaggtgacggttgaagatatcgaatgggtgatccattcgagccagctgacaccgaaatacgaacaaaaaatcgcctctaaaccgcaggtcggcatcgtcaacggacttgccgtccacgggcctaacagcggttcgctgctcgaaattgaggtcacagtcaatcaggcggctgataaaggatcgattaatatcacaggcattgcagaagaagagaatatcggcaaccagtcaaaatcgatccgccggaaaagcatggcgaaaggatcggtcgaaaacgtcatgactgtattgcggacaatgggagtcaaagcttcggattatgatattcacgtgaatttccccggcggtatcccggttgacggaccatctgcagggattgcaatggcggcgggcatattctccgctattcataagattccgatagaccatactgtcgccatgacgggtgaaatcagcctgaacggccgggtaaagccgatcggcggcgtgattccgaaaatcaaagcggccaagcatgcgggggcaaaaacagtcattattccgcacgaaaatgttcagtcgattttaaagcggatagaaggcatacatatcgttcccgtcaaaaccttgcaggaagtactcgacctcgtattggtcaaccctccttcagaaatgctcgacggcgttcaaatgaaaagagaatccgtttaaatccccatcgtttcagatggggatttttttcggggcggtttctccgaagccgggagccggcatgttttcttagcggaggacatcttttcctttttcagaactgaaagaaagggtatactacaggagaccctttttatttcgccgggcttacaattgtacaggaataaaaaaagtatattataatggttcatactaaagttacggaggtgtcagtcaaaatggcagatgaaacgaaacgaaacatcccgctcctccctttaagaggtttactcgtctatccgacgatggttttgcaccttgacgtcgggcgtgaaaagtcggttcaggcacttgaacaggcgatgatgaatgaccatatgatctttttggcaacgcaaaaggacatatccatagacgaaccggatgaagacgagatttttacattcggaacctatacgaaaatcaagcagatgctcaagctgccgaacggaacaatccgcgttttggtggaggggttgcagcgcgcccgcattcttgagtaccatgacttagatgaatatacgtctgtaaaaatcgagcgaatcgatgaagagactgaaaaagatgttgaagatgaagcactcatgcgcacattgcttgaccacttcgatcaatacataaagatttcgaaaaaaatatcggcggaaacatttgccgctgtgacagatattgaagagccgggaagaatggccgatattgtcgcctcccacctcccgctcaagctgaaagacaagcaggaagtgctggaaacgatcgatgtcaaagccagattgaacaaagtaatcgacctgattcacaatgaaaaagaagtccttgagattgaaaagaagatcgggcagcgcgtcaagcgttcaatggaaagaacacaaaaggagtattacctgcgcgagcagatgaaagccatccaaaaagaacttggcgataaagaaggaaaaacgggcgaggtccaaaagctgaccgaaaaaatcgaacaggcaggaatgcctgacaatgtgaaagaaaccgcgcttaaagagctgaaccggtacgaaaaaattccgtccagctcagctgaaagctctgtcatccgcaattatatcgaatggcttatttctctcccatggaacgatgcaacagaagacaggctggatttaaagctcgccagtcaaattctcgatgaagaacaccacggccttgaaaaagtgaaggagcgggttctcgaatatttggctgtccagaagctgacccgctcgttaaaaggaccgatcttatgcttggccggccctccgggtgttggaaaaacctctctggcgaaatcgatcgccaaatcgctcggacgcaaattcgtccgcatttcccttggcggcgtgagggatgaatctgaaatccgcggtcaccgccgcacatatgtaggcgccatgccgggccgcatcattcaggggatgaaaaaagcaggcaagaacaatcccgtattccttttggacgagattgacaaaatggcgtcggatttcaggggagatcccgcttcagcgatgctggaagtgctcgatcctgaacaaaaccatacgttcagcgaccattatattgaagagacatttgacttatcaaaggttttgtttatcgcaaccgcgaacaacctggccacaatccccggcccgctcagagaccgcatggagatcatcacgatcgccggctatacggaagtggaaaaggtcgaaatcgtcaaagaccatctgcttccaaaacagctgaaagaacacggtttgaaaaaatccaatctgcaaatacgggagcaggctgtcctggccgtcattcgctattatacgagggaagccggcgtcagaaatcttgaacgccaaatcgcagcgatatgcagaaaagcggcgaagctgatcgtatcaggggaaagaaaaagaattacggtcacagacaaaaaccttgaagactatttaggaaaaagaatgttcaggtacggacaggctgagctcgacgatcagatcggcgttgtcacaggtcttgcctacacgacggtcggcggtgatacgctgtccatcgaagtgtctctttcccccgggaaaggcaagctcattttgaccggaaagctcggcgatgtcatgagagagtcggcgcaggccgcattcagctatgtccgttcaaaggcggaagagttgaacatcagccctgattttcacgaaaaacacgatattcacattcacgtgccggaaggagccgttccgaaggacggcccatccgcggggatcacaatggcgacggctcttgtctcggcgctgacgggccgacctgtttcgcgaaatgtcggcatgaccggcgaaatcacgttaagaggccgcgttcttccgatcggcggcttgaaggaaaaggcgctcggcgcacaccgtgccggcttaaagactgtcattatgccgaaagataatgaaaaagacattgaggacattccaaacagcgtgcgggaaggcttgaccttcattcccgtcgctcacctggacgaagttctaaagcatgcgctagtaggagaagagaaatgaaagtaacgaaatcagagattgtcatcagtgcggtgaaacccgagcagtaccctgaagggggactgccggaaatcgcccttgcagggagatctaatgtcggaaaatcgtcattcatcaatacaatgatcaaccgtaaaaacttagcgaggacatcttcaaaaccgggcaaaacacagacattaaacttttatatcattaacgatgtccttcactttgtcgatgtgcccggctacggatttgcaaaagtctccaaaacggagcgcgaggcttggggccgtatgatagagacgtatttgacatcccgcgaagaactgaaagcggtcgttcaaatcgtcgacctcaggcatgctccttcacaggatgatgtgatgatgtacgactttttaaagcattatgaaattcctgtgatcgtgattgcgacaaaagcggataaaatccctaaaggcaaatgggaaaagcatgccaaagtcgtcaaagagacgcttaatatagaaaaagaagaccggctcatattgttttcctccgaaacgaaaaagggtaaacaagaagcatggtcggcgatcgagcaaatgatcgcgagataaagaaaaagcacttgcgggattgatgcaagtgctttttcttgaataaactattttctttttaagaataataagagcagactaaccgcgataaaagcggccggccaataagcttctacatatgccgtctcgatattcaccgacttcagccaggcggcaatttgccggaaaaagtaaagatagagggcgaccgcgatcatcagcagactttcatattgatattcttttgtcttaaacgatttgacaagcagcgccgcaccgaagatcagcacgatgaccgcaaaatcatccgcgcggctgaaatagtcctctttaaatgtgaaataaacgccgatcgctgtcattaagagccctgcaaaggaatgggcggaatcggcttccttctgtccctgataaaaaagagccagtccgacgagacctgcaagtacagaccattcttcctggccgtcaaacaggctgatccggcccgaccgcaaaaaggcgtagacagcaacggctatcaacagcaatggaagcaaaacagatttctttttcaaagtatcaccttcttgatgtagtgaaagaaatagaaacacattttctactatatcacatcaattttttaaaatctgttcacattttgggaagagaaaatagtgaatatatgttataatcgttttgaataataaattctatattataatcattctaatttagatagatgttgggggtgcaagcaagagttatgcatatacttgtcgtgggattggattacaaatcagcccctgttgatatacgtgaaaagttaacctttcagccggatgagctggggcaggcgatgtcgcaattgaaagaagaaaaaagcatacttgagaacatcatcgtgtcgacatgcaaccggacagagctgtatgcagtcgttgatcagctgcacaccggacgttattatatgaaaatgtttttggcgaactggttcggattaagcaaagaggacgtttcgccttacttgaagttttatgaaaacgacggggccgttgaacacctgttccgcgtatcgtgcggattggattcgatggttattggagaaacgcagattttgggccaagtgcgtacaagttttaagctggctcaggaagagaagacaattggtaccgttttcaactatttgtttaagcaggcggtcacggtcgcaaagcgctgccatgccgaaacggacattgcttcaaatgctgtatccgtcagctatgccgccgtcgagcttgccaggaaaatcttcggcgacctttccgataaacacgtgctgattctcggggcgggcaaaatgggtgagcttgcggttcaaaacctgcacggccacggaatcggacaggttacggtgatcaacagaacattttcaaaagcgaaggagcttgccggccgtttttcaggcgcggcgaaaagcttgaatgagctgcaatgcgctttgatggaagccgatattctcatcagttcgaccggcgccagcggctatgtcgtcacaaaagagatgatcgaacatgtcaataagcttcgcaaaggctgtccgctttttatggtggacattgccgtgccgcgggatcttgacccggctctcagcgaagtggaaggcgtcttcctgtacgatattgacgatcttgaagggatcgtcgaagaaaatttgaaggaacgccaggccgttgccgaagaggtggagctgattattgaagctgagatcgtttcttttaaacaatggctgaatacgctcggcgtcgtgccggtcatctcggctctcagggaaaaagccttgacgatccaggcggaaacgatgcagagcatcgaacggaagctccctcatttgagcacaagggagaaaaaacttttaaacaagcatacgaaaagcattatcaaccagcttttgcgcgacccgattttaaaagtgaaggagtttgcgtcagaagctgatgccgaagaaaagcttgcactgttcacgcagatttttgatattgaagaagcggcttttcccgacggggagaagcaggacgaacgtcagccggttcatgcgtttaagcggcaaaatccgcagggtttgacttctatcgcgagcgagtgacagacatgacagacacattgttagcaaggcttaacgaagttacaatcgtgttgtacgcgttcaccgttctcttttattttatagactttttacagcacaaccggaaggcgggaaaagcggccttctggttgctttctattgtctggattctccagacggtttaccttttttatttcatgcagtacacagatcagtttcctgttttgaataatgcgcaggggctttatttttacgcgtgggtgctcgtgacgctgtctctcgttttgacgaaactcttgaaggtggattttctcgtttttttcaccaatctcatcggcttttcaatggcggcgatccacacgtttactccgacggcccagcagtcggcggagctttcgggcaggctcgtgtccgagcttttgatcatccacattacgatggcgattctttcgtacggggcattttcattgtcctttgtcttttccgtgctgtatctttttcagtaccgcttattgaaaaagaaaaagtgggggaaatggcttttgagaatagaagatttgtcaaaacttgatcatatggcgtatgtcctcaatctcatcggcgttcccatgcttctgctgagcctgattctggggattatctggtcgtatgtatcgcttgaaaccctgtactgggcggatccgaaagtgcttggatcgatcgtgctgctttttttatacggatactatttatttatcaggattgtcaaagagctgcagggaaggatcgcggccatgtggaatgccgcgtcttttcttgttcttttaatcaatttctttttgctcggcagcttttcgcagtttcattggtttagttagttaaaacggttgcccgtgacggattgggaggaagaaaacatgagaaacatcattgtaggctcaagaagaagcaaattggcgatgacccagacaaaatgggtgatcaaaaagctggaggaattaaatccggatttcacgtttgaaataaaagaaatcgttacaaaaggcgaccggattttggatgttacgctgtcaaaggtcggcgggaaaggcctgttcgtcaaagaaatcgaacaggcgatgctttccggggagattgacatggccgttcacagcatgaaggacatgccgtcggcgcttcctgaagggctgatggtcggctgcattccaaaacgggaagaccccagggacgttctcatttcaaaaggccgtcaaaagctggctgacttgaaacaaggcgcagttgtcggaacgagcagcctcagaagaagcgcacagcttttgcaaatgcgccccgaccttgagatcaagtggatcaggggaaatatcgatacaaggctgaaaaaacttgaaaccgaagattacgacgcgattattttagctgcggccggcctgtcaagaatggggtggaaggacgatgtcgtcactgaatttcttgatccggaaagctgccttcccgccgttgggcaaggcgctttggcgatcgagtgcagaggctctgatgaggagctgctgtctctcttttcgcgcctgaacgaccgctacacacagctgaccgtcacggctgagcgcgcttttcttcatgcgatggaaggcggctgccaagtgccgatcgcaggatttgcaaagatggacgaagacggcgtcatcgaactgaccggtcttgtggcatcgcctgacggaaaaaccgtatacagagaaacagtaaaaggaaaagatccggaggctgtcggcagagaatgcgccgcagtcatgtcggaaaaaggagcaaaggcactgattgaccgggtgaagcaggagctggaagaccatgaagcatgatcttcctttagagggaaagaaagtgctcgtcacccgcaataaagcgcaagcccaatcctttagggaaaaggtggaggctttgggcggagaagctgttttaacgtcattgatttcgtttcggcccgcccttccgccagaggcggcccagcgctttcaagcggatcttgaaagcgcggactggcttgtttttacaagcgtgaacggggcaaaattctttttttcttatttaaaggacgccggggccagtgctcctctcgcgtccgaggcgaaggttgctgcagtcggtgaaaaaacagcccggtatttgcgcgacaggggtctttctgtcgatctgatgccggagttatacgtggctgaacatttggcggaggcacttaagcaaaatgccggacgtcatgacaaagtggtcgttttaaaagggaatttatcccgggacgtcatcaagaaaaccctctctcctctcggaattcaagtttcggaatggattttgtatgaaaccgtgcgtgatgaaaggggaattctggacctgaaggaagcagcaaagcacgcgtcttttgattttgtgacgtttaccagttcttcgacggtacatacattcatgtccattctgaaagaggagagcttagcgtgggccgaaaagaaccggacggcttttattacgatcgggcctttgacaaagaaggcgctgtcggactacggaattccatcatatatgccggacgtctatacaatcgacggaatgctgcgcgaaatgtgccgcatttcaagaaagggagaatgactaatggaagcatcatttcaaagacaccgccgcctgcggacgacagcaggtatgcggaaattagtaagggaaaccgagttaagagcatctgatttcatttatccgatatttgttaccgaggaagagaacgtcaaaagcgaagttccttctatgccgggcgtgtaccagctgtctttggaccgtttgaaagaggagatggaggaagtcgcaagcctcggcattcaatctgtgatcgtcttcggcgtgcctgagcacaaagatgatgtgggaagcggagcctatcacgatcacggcatcgtccaaaaagcgattgcacaaattaaacaggactttcctgaacttgtcgttatcgccgatacgtgcctatgcgagtacacggaccacggtcactgcggcctggtggaaaacggtgaaattttaaatgacgaatcgcttgttcttttggcaaaaaccgctgtcagccaagcccgtgcaggcgctgacattattgcgccgtcaaacatgatggacggtttcgttgccgctatcagggaagcgcttgatcaggaaggatttacaaatgtgccgatcatgtcgtacgctgtaaaatatgcgagcgctttttacggaccgttccgcgatgctgcgggaagcagtccgcagtttggcgaccgcaagacgtaccaaatggattatgccaaccgcagggaagctctccgggaggcaaaatccgatgtggaagaaggcgccgattttctgatcgtcaagccgacgctttcatatcttgatatcgtcagagaagtgaagaacgaatttaacctgcctgttgtcggatacaatgtgagcggggagtatgctatggtcaaagccgccgcccaaaacggatggattgaagaaaaagctcttgttctcgaaatgctgacaagcatgaagcgggctggcgccgatttgatcattacgtactttgcaaaagacgcggcaaaatggatttcggaataagaatttgaactgggggttttagaggatgcggagctatgagaagtctaaagcggcattcgaagaggcgcaacgagtcatgccgggcggggtgaacagcccggtcagagcctttaaatcagtcaacatggacccgatttttatggggcggggaaaaggatcaaaaatctatgatattgacggaaacgaatacatcgattatgtcctgtcatggggaccgcttattttgggccacagcaatgaaaaagtggtgaaagagattcaaaaggcggcagaacacgggacaagcttcggtgcgccgacagaactggaaaccgagcttgccgagcttgtcatcgaccgcgttccttccatagaaatcgtccggatggtgagctccggtacggaggcgacgatgagcgccttgcggctggcgcgcggatacacaggccgtaacaaaatcgtaaaatttgaaggctgctaccatggacacggtgattccctgctgattaaagcgggctcgggagtagcgacactcggcctccctgacagccccggagttccggaaagcattgcaaaaaacacgattaccgttccttacaatgatctggaaagcatgaaacttgtctttcaagaattcggagatgacattgcaggcgtcatcgttgaacctgtcgctggcaatatgggcgtcgtaccgccggttaaagggttcctcgaagggcttcgcgagctgactgagacgcatggcgccctgctgatatttgatgaagtgatgacaggattcagggtggattacaactgtgcccaaggctatttcggggtgacgcctgatttgacatgcctcggaaaagtgatcggcggcggtcttcctgtcggcgcttatggaggaaaggcggaaatcatggagaagatcgcgccgagcggtccgatctatcaggccgggacgctgtccggcaacccgcttgccatgacagccggacttgaaacgttgaaacagctgacccctgaatcctaccgggaattctcccgcaaagctgaccgcttggaaaaaggaatttctgaagctgcagagaaaaatggcattccgtgtacattcaacagggcggggtctatgatcggctttttcttcacaaatggaccggtcatcaattatgatacagcgaaacagtctgacctcggactgtttgccgaatattataaaggaatggccgatgaaggcgtgtttctgccgccttcacagtttgaagggctgttcttgtcaaccgctcatacggatgacgacattgagcatacgattaaagctgctgaacgcgtattcgaaagaatcagccgctccagataaagaaaagggctgccggacattgccggcggctcttttttgcatggtgccgaaaacggctgctgatttttctgttcatattctgcctgcttttcacatacatctttactgacatctaattttaaaaattaggtgaagggaggatatcagtttgccgcaaaacaatcgtttgcaattttctgtagaagagtcaatctgttttcaaaaaggacaggaagtatccgaattattatcgatttcattggatcctgacattactgttcaggaagtaaatgattatgtatccatacgagggtcattagagctgacaggcgaatacaacatagatcaaacccgggagtatgcagagctgcctgcgacaagccgatttgtagaagatgtaaagctgaaaggggacggcagcgcagagctgacgcattgtttcccagtggatatcaccatcccgaaagacaaagtcaatcatttaaacgacgtatttgtttttattgacgctttcgattatcagctgacagatgcgaggatgctgacgattcaggctgatttggcgattgaaggcctcttgaatgtgagcggtgaagcgggtgaagaagaaccgcgcactatgcctgcggccgtccatccggaagaggagctcgaacctgcctacagatcaccttcaaacgacgaagatcagggtgaagagaaagaatatttgatccagcttgacagaccttacgaagagcaggacgaagaacaggcggaagaacatgataccggtgaggaaacggttccgatttaccagtcgtttctcggaaacgacacagaggaagctaaaccgttttttacagcgtctttgtcggcggcagagcgtacgaagcgcgaaatagaaaatcaaaaagaagcctctcttgaacagccggaagaagaatataagctgaaaagagagaaagtggaagaggaaccggaagaatatgagctgaaaagagagaaagtggaagaggaaccggaagaatatgagctgaaaagagagaaagtggaagaggaaccggaagaatataagctgaaaagagagaaagtggaagaggaaccggaagaatatgagctgaaaagagaagaagcggaagaagagccggagctgtcgcacagctcttatcaacctcacgaggaactgaaagagaacccgttctacagtgttcctcctcttctgaaggaagaccagaatgacagggagcctgaggcttttgaggttgaggtgacacaggaagcagaagcgattgatgaagaagaggaagccgggcatacgattgaaatcccggaatattcgtttcatgagcagacggagcccgaagaagaaagagatgaaatgcaggcagcggatgaacaggaagtgtcagcaaaggaaaacgacaacgcactctatttgacaaagctgtttacaaagcagggagaggaggagtttactcgaatgaggatgtgcatcgttcagcaaaatgatacgattgatcttctgtgcgagcgctatgatattaacgtccagcagctcatccggatgaattccctttcccttgacgaggaattaaaagagggacagatcctttatataccggattatcaaaacagccatgcctaatgcattgataaaaatgtggtgaagccgatggaaggcatccagtctgttttaaatgagtacggtcttacgcctgaatatatggagtccgtcagttcaaaggtgtggaaagtgtatacggatcacggtgtatttgctctgaaaaaattggcggcttcaagaaacacccgcttcacggaacagatgatcatgctggaggaaaaaggctacaggcagttcgttcctgtctatcgaaaccgcacaggcgaatttttaacgcaagccggagaagatgtctgctatctcatgccctggcttactcttgaaagggaggaagagcgggatcaaaaacacgaatatatgtttaaagaaatcgctcttcttcaccagcggacggaaaaagagctcggcgtgaggcgggaagaaatactcggacactatgaacggacaaaacggaaatgggaacagcaaaaacagaaatatgaagcattcatcatgaaagcggaaaacgaatggtatatgtccccgttccagcttcaggcggccatgtatttcaaagagacgatatcagctgccgactttgcgatcgcccgccttgaagattggcatgaagccatgagagaaaaagagtctgccagaatggtcttaaaccacgggcacctgtccgttcggcattttctctataacgataccggaacgggttactttacgaactttgagaaagcgggacatgcgccgcctgcaaatgatctcatcgtattttttactagaatgtttaagacgaaccccgttatgtgcacggaatgtgtaaactggttttatacgtatcacaatgtctatcctttgcgggaggaagaaatcagcttattcctcagctatatggcttacccggggcctgtattcggcgtactgaaccgctacgaacatgagaaggggctcggggaaaaagaagcctgtacaaggcttttaaaggcgtactggcaaatgaaaaacgctgagccgcttgtgatgagcattcacgagacggaagaaaacagaaaactgcaggaagaaacagagtccccatcatcatgatgcggactttttttcgtgcttaaatccagtcaaggtgaaaggcgcacgcaaggaatatgagaatgcccaaaaggaggacatcaaatgtggtaggaaagatgatcgtgcggatgccctggaatatcgtaatcgggaggacgacttgaacagcaacaagcctgacttgcttcagccacggctggaatgaatatgtgttgaatttttttcgcatcttatgcctcctctccttttcgttacagcatcatatgaggaaaaggagcttgtgtgcatggcccaatctcgtataaaacaacagaaaaacggaaaagatgattgacgaaaatgaaaaagatttagtaatataagaaaaagaaaaagtacgtgctgaaaagtcaatgatcacccgctttgaatgggaagagtacaaaaacagacgcttgcagagagggaagccggttcgctgaaaggctcccagtcagtcttttttggaaggtcgcccaggagcgcaatttctcgaacaaaaaagtagagaaattcgggaaagtcccgttatcccatttaagtgcgtgaatgcgtttttttgcattcatgaaaaaaggtggtaccgcgagagagttctcttcgtccttttaacaggatcaagaggactcttttttattgttcagccgtttaatactgttggaggtttgaaaatggataatcaagaactgacgatgccgacaaaatacgatccgtctgcagttgaaaaagaccgatacgactattgggtgaacggcaaatttttcgaagcgaaaaacgatccagaaaaagaaccgtacaccgttgtcattcccccgccgaatgtgacgggtaagctgcacttggggcatgcttgggattccaccttgcaggatatcgtgacaagaatgaaacggatgcagggctatgacgtgctctggctgccgggtatggaccacgccggtattgcaacccaggcaaaagtagaagcgaagcttcgtgaagaaggaaaaacgcgctatgatctcggacgcgaaaaattccttgaagaaacatggaattggaaagaggaatatgccgattttattcgcagccagtgggcaaagctcggtctcggcctcgattattctagggagcggttcaccctcgatgaggggctttctaaagcggtgcgcgaagtatttgtaaagctttatgaaaaagggctgatttaccgcggagaatatatcattaactgggatccggcaaccaaaacggctttgtcagacatcgaagtcatctataaagacgtacaaggtgcgttctatcatatgcgatatccgctgaaagacggttcaggctcgattgaaattgcgacgacccgtccggaaacaatgctcggcgatacagcggttgcggtgcatccggaagacgagcggtacaaacacctaatcggaaaaacggtcattctgccgatcatgggcagagaaatcccgattgtcggagacgactatgtcgatatggaattcggttcaggcgccgtcaaaattacgcctgcccatgatccgaacgactttgaaatcggaaaccgccacaaccttgaacgcattctcgtcatgaatgaagacggcacgatgaatgacaatgcccttcaatataaaggcatggaccgttttgaatgccgcaagcagatcgtgaaagatcttcaggaagagggcgtgctgttcaagattgaagaacatacgcattcggtcggccacagcgaacgaagcggagcagtcgttgagccgtatttgtcaacacagtggttcgtgcaaatgcagccgcttgccgacgccgccatcgaattgcaaaaaagcgaaggcaaagtcaacttcgtccctgaccgttttgaaaaaacgtatctgcactggatggaaaatatccgcgactggtgcatttcccgccagctctggtggggccatcggattccggcatggtaccataaagaaaccggtgaaatctatgtcggcgttgaagcgccggaagatgcagaaaactgggagcaggacaaagacgttcttgatacatggttcagttccgctctttggccgttttcaacgatgggctggcctgatatcgatgaggaagatttcaagcgctactatccgacgaacgtccttgtcacaggctacgatattattttcttctgggtatcgagaatgatcttccaaggtatcgaatttaccggagaacgtccgtttaaagatgtcttgatccacgggctcatccgcgacgaccagggccgcaaaatgagcaaatcgctcggaaacggcgtcgatccgatggatgtaatcgacaagtacggagcggattcgctgcgctacttccttgcaacaggaagctctccgggtcaggatttacgcttcagctttgaaaaagtagagtcaacatggaattttgcgaacaagatttggaacgcatcaaggttcgctctgatgaacatggacggcatgacatacgaagagcttgacctgtcaggggaaaaatccgttgccgataagtggattttaacaaggttgaatgaaacgattgaaaccgtgacacagctggccgacaagtacgaattcggcgaggttggccgccatctctacaattttatctgggatgatttctgtgactggtacatcgaaatggctaaacttccgctttacggcgaagatgaagcggcgaagaagacaacccgctccattttagcgtatgtgctggatcaaacgatgcgcctcctgcatccgtttatgccgttcctgacggaagagatttggcagcatcttcctcacgaaggggaatccattacagtcgccaaatggcctgaggccgtcaaagaatatacggacaccgaggccgcggcggatatgaagcttctcgttgaagtcatccgcgccgtacggaacatccgcagcgaagttaacacgccgctcagcaagcagattgaactttatattaaaacgagcacgccggaaatcgctgaacgacttgaagaaaaccgtttgtacgtagaacgctttacgaatccgagccttcttcagatcggaacggatattcaagcggtcgataaagcgatgaccgctgtcgtatctggcgccgagctgatcttgccgctcgaaggtctgattaacattgacgaagaaatcagccgccttcaaaaagaactcgataagctgacgaaggaagttgaacgggttcagaagaaattaagcaatgaaggatttatgaaaaaagcacctgcacatgtcattgaagaagagcgggcgaaagaagccgattatacggcgaagcgtgaagctgtagaaaaaagaatcgccgaattgaaaaactgataacacgaaaaaggaggtgttttccaggtctttctaaagctgttggaaaacaccttcatcaattgaagggaaggaatgcgcttgttcaaaacgtttgatgaagcactcagctggattaacggaaggcttaaattcggcgtgaagccgggtttggaacgaatggaatggctgctgagaaagctcgggcaccccgagaaaaagctcaatgcggttcatgtcgccggaacaaacggaaaaggttcaacgatcgcttttctccgttcggtattaaatgaagccggttatacagcaggcaccttcacatcaccgtatatcatcacctttaacgaacggatcagcgttgacggcgccccgatctcagatgaagaatggacggcgctctttaatgaggtcgggcctcttgtccttgagcttgaaaaaaccgaattcggagccgccacagaatttgaaattattacggcatgcgcatttttatattttgctaaatacaggcggacagattttgttatttttgaaacgggcttaggcggccgtttggattcgacaaacgtcgtgaagccgatgttaacggtcatcacttcgatcggccatgaccatacggcgatattaggcggtacattgaaagagattgccgcggaaaaggcagggatcatcaaacgcggcgttcctgttatcacagccgttcatcagcatgaagcggctgaggtgataaagcgaaaggcgatggagacagaatctgcttttatatcccttcacgaggattgccagctgtacggggagctttcattgcctgagggagagcagttttcgttgaaaacaccgttacatcattatgaaggaattgaaacaagcctgatcggcacccatcagcggcaaaacgcgtctttggccatacttgcggccgaatggctgacagccgaaaaacatgcggcgatcggcgaaaaagagctgaaacgcggcattcgtaacgcgggatggcccggccggtttgagaaggtattgaacaagcctcttgtttatatcgacggcgctcataacaaagaagggatggagcggctggccgagacgatctcctcccacttcgccgggcggaatattcacgtatgcttcagcgctcttaaagataagccgtacagagacatgatccgcaaaatcgagtcgtttgcgtcatcgattcacttcacatcctttgatttcccgagggcggaatccgctcaaaagctgtttgagcaaagtaccgctgattataaaacatttgatgaagacatcgcctctgttttccggtatatcgaagaaaaagctgaagaggaaaaagcggtggtcgttatcaccgggtcgctttattttatttccgccgtcagggcagctttaactgaataaaacataaaaatgcgcttttggccaccggctgacggcgcatttttatgttttaggaaaagcggaggcgcttcatatttgctaaaataacagccgctaggcagcagcttttttcatgaaatttgattctgcgaggttgataacgatgttcatcttttacctttttacggcaggtttagtgctcggctctttttttaattcggccgggcgccgcatttctgaaaagatatcattgattgctccgcgttccctctgccgcgtctgcaaaaggcagctgggcttctcggagctgataccggttttgtcctatttgatgcagcgggggaggtgcaaaggatgtcaaaccccgctctcgatcgtgtatccggcagttgagctctccgccgccatcctgtttgcgtttgccggcatgcacgttgggcatgagggggagctggtgattgtgcttgctcttatatctctgcttttgatcgtctttgtatctgatgtgacacacatgatcattccggatgctgttctttgttttttcctgcctgtctttgccgtcggacgattccttgttcctctggaacagtggcactcaagtttgagcggtgcgatggccggcggtatgctgcccctcttgacgctgcttttgacgaaaggggggatcggctggggagacgtaaagctgtttgcggtaatcggcatggcgctcggcagccgcctcctcgttctcgcttttttcctctcggcagccgcaggaacggtgcttggtcttattgcactcctggcaggcaaactgaagaaaaatgaaccaatgccgtttgctcccgcgattctggccgggacgctgacgagctgcttctatggcgaaccaatgatcgagtggtaccttcaaacggcatggtggtgaaaaatttgacgaaacctttttgggcaagacgacaaaagtcttgttctttttttttgaggctgtgataaagtgtggacattaagagggacagcctttaggagaactcctccttccttctggcttccctctgccgagcgtatagagagcggccaagctgccgcctaaatcaatataaaacaattaacagaaagcgagggaagcatatgaaaaaacggaaaagcaagaaaaactcagctaaaaaagcgcccgaacaagacccgcttaaagtgatgatcaacggcagagaagagactatctacggaaatgaaaaagagttttccaacagaaatgaagaaaagaagtttaccttttcgaactgggaagaaaagagaaaggcagaacgggaaatatcggcttcaaaagaggacggcacacatgaaacaggtgaatttacatggacgccaccggacgaagaagaaaccgtctacaaagacgatcctaaagtggtggcgccttatcaaaagaaaaacgagcccaaaaacaaccgcaaaacgaaaacgtctcttacgtatcctgtgaagcgatttgccgcgaccatcgtctttgctgttttgctcgggacgggactcggtctgtttgcgctgaatctcgcaacgcataaagaaggagtgccggcttccggcagtcttggggcggatgctgaaaacggccagaccgttaaagccggtgactccggtgccgaggagaaaaagagcggagaaaaaaatagcggacaagcgggagaatcttttaacagcttcgccgttcaggccggaaagttttcgtctaaagaaggagcggatacgctggcctctcaaatcgcagacaaggggtatgccgccgtgtcgattgccaaggacgacgggttttatgtaatcgccggaataacgggagaaaagcagatgacatctgaacttggcaaaatattaatcgaaaacgattttgaagcgtggggcggaaaagagcttccggttgcaatcgagtccggtttgctggagccttttaaagaagcggctgagctgtcggcaaaagcgattctcggcgcggaggttacatctcaaaacatagccgatgtcaaagctcaacttgacggggcccaatcaaaaggctctgaagaggtaaagaagagcatactggaagccgtcaaccttctggagaaaccgaccgcagccaacggctggaagagccagcagctattgctgggccaaattaaataaatagaaaaccagcagacgtgctggtttttttattttcgcgatttttgtcattaaaaagttatttttctgaaattgtggcggcggcgttcttttggtaggataaaacaggtatctttttttcctatgcaaaaacctttgaaaggatggcttcttatgacccgacagctcatattggcttcacaatcaccccgcagaaaggaactcctcgatctcctgcagattccgtacagcatcgttacgagcaatgcggaagaaaaattaattcgaaacttttcaccagcagaaaacgtcaaatggttggcggaacaaaaagtgcgtgcagtagccgaacaatatcctgatgccgtcgtgcttggcgccgacaccattgtttattatgacggagcttatttgggcaagcccaaagatgccgaagatgcagaacggatgctgagcatgctttcgggacagacccattcagtgctcaccggcgtctgcattaaggacggcgaaagatgcgaaacattttttgaggaaaccgaagtctctttttggcctcttgaagaaaaggaaatcagcgcttacatcgctacgggagaaccgtttgataaagccggttcatacggaatacaaggaaaaggcgcgctttttgtcaaacagataaaaggagactattatacagttgtgggccttccgatttccaaaacgatgagaatgctgaaaacgtttgatctccactccttttgatgtaccgaacgagaagggaatcaaaagggagggtttatcataagcgatctgccattgaaattaaaagattttcctgatgaagaaaggccaagggagcgccttctcaacacaggcgccgaaagtttgtcaaaccatgaactgcttgcgatactgctcagaaccggtacgaaaaaagaatcggttcttcagctttcaagccggctgcttcaaacgtttgacggcctccgtttgttaaaagaagcatccgccgaggagctttcaagcatttccgggatcggccgcgcaaaagccgtgcagattttggcggcccttgagcttggccggcgcattcacagtctggcttgcaaagaccgttatgtgattcgttttcccgaagatgcggccaattttttaatgggggatatgcgctttctctctcaggagcacttcgtatgtgtgtatctgaacacgaaaaaccaggtgatccacaagcgcacggtttttatagggagcctgaactcttcaatcgtccatccgagggaagtgtttaaagaagctttaaagcgctccgcagcttcattcatctgcgtccacaatcatccgtccggagatccggctccaagccgcgaagacatagaagttacacagcgccttcacgagtccggacagctgctcggaatcgaattgctcgatcatatcatcatcggtgatcaaaaatttgtgagcttaaaagaaaaaggatatttgtaacactttttttttcattaaattaagctataatagaatttatgggtttttgcttaggaatattgttttaagaaaggaagatacatacaaatgtttggaattggtgcgagagaccttggaatagatttaggaacggcgaatacgcttgtttttgtgaaaggtaaaggaattgtcgtcagggagccttctgtcgttgcactgcaaacagacacaaagcagattgtcgcagtcggaaatgatgcgaaaaacatgatcggacgtacgcccggcaatgtcgttgccctccgcccgatgaaggatggcgtaatcgctgattatgaaacaacagcgacaatgatgaagcattatattagcaaagcagttaaaaacaaaggcttatttgcgagaaagccgtatgtcatggtctgtgtcccgtcgggaattacggccgtcgagcagcgtgcggttatcgacgccacgcgccaggccggagcgagagatgcatatccgattgaagaaccgtttgcagcggcgatcggtgcaaaccttcctgtttgggagccgactggaagcatggtggtcgacatcggaggcggaacgaccgaagtcgcgattatttccctcggcggcatcgtcacatcccagtctatccgcgttgccggagatgaaatggatgaagcaatcattacttatattagaaaaacatataacttgatgatcggtgaccggactgcagaagcgatcaaacttgaaatcggttctgccgaagcttctgaaaacggagaaagcatggagatccgcggccgcgatcttttaacaggcctgccgaaaacgattgaaatcactgaaaaagaaattacagcggctcttcgcgacactgtgaccgccattgtcgatgccgtaaaaaatacgcttgaaaaaactccgcctgaactcgcggctgatattatggaccgcggaatcgtccttacgggaggcggcgcactgctgcgccacctggacaaagtcatcagcgaagaaacgaaaatgccggttttaattgcggaagaccctcttgactgtgtagcgatcggaacaggtaaagctctcgagcaaattcatctatttaaaggcaaaaattaaggacacagggaatagaagaggtgtataatcatgccgcagttttttacaaataaacggttgatgcttttactcctttgtatcatcattttagtggcaatgattggattttcgttaaagaatgaccggaatgcaacttggcccgaaaaatttattggcgatacaactggtgtattccagacgatttttcatacgcccgctcaattttttgcgggcttctttgaaaatatcgaagacttaaaaaatacgtacagcgaaaatgagcgcctgcggaaaaagctcgacggccagacacaatacgaggcaaagctgcaggagcttgaaaatgaaaataagtctttaagaaaagagctcggccatctgaaatcaattaaagactacacgccgattctggcgaccgttatcgccagaaatcccgataagtatgagtggtggaacctgattacgatcaacaaaggttcaaagcacggcgttgagaaggatatggcggtaacagatgaaaacggcaacttgatcggaaaaatcaaaagcacaaaagtgaacaatttcacttccaccgtccagcttttaagcgcaacagacagaaacaacagaatctccacagttatcgctgcagataaaggcaagaaaacggtgaacggaatcatcaacggctacgactcagataaaaaggcgctttccatggaaatcatcgagcctgatgaagacagggaagtgaaaaaaggtgacctcgtcgaaacttccggtgcgggcggcgtttttcctaaaggcctgacaatcggaaaagtgacagaggttgaaccagattcctacggtttgacgaaaatcgcttatgtagagccggcagccgatatgtataaccttgataacgtcatcgtcgtcgacagaacgcttgatacggtggatgtcgacaagatggacgatgaggaggaagggtcgtgaaacgcttccttcttcccgtcgtcatgatgtttgttttagtatctgacagcgtctatgcggattttgtcaacttgccttttgtgacggaagaacagcagctcatcccgcgttttctgctgcttgtcttagtttttatgacggcttatgtcaatcagccttttgccattacatatggatttattttcggactgttatatgatattaattacaccgaccttttaggtgtatatatgtttggttttgccggtatttgctatttatcgtcaaaagcgttcaaagtattgcagacaaacgcgctggtcgtcatttttatttcgctgctcgccgtctgtgttcttgaattttaccaatatggcgtgcagatgctgatacgtccggaaattatgccgttccatcaatttgtgctcggcaggctcctgcccacgcttgcgctgaacgccgttggcggccttctgctcatttacccgttcaaatggttttttaccagtcttaagaaagagctgaggaatgagtaaaaagaggattttatgagccgatgtcgaaaagagtatgatgttgaggtgaacaccgtgaagacccaaaagcagcaatacgtaacaattaaaggaacgaaaaatggattgacgcttcatcttgatgacacatgctcttttgaagaattattgtacggtcttcaggatatgctgtcactcgaacattatatggatggaaaaggccagaaaatcaatgttctcgttaagctcggccaccgctatgtgaccgaggagcaagaacagatcctgaccgatgtgatcactgagaaacaaaatctgttcatccactccattgaaagtgaagtcatgaccaaagatgaagcaaaccgcttaaaagcggaaagcgaaattatttctgtcgctaagattgtccgttccgggcaagtccttgaaacggagggtgatttgcttctcattggggatgtgaatccgggaggaatggtgaaagccggagggaatattttcatcctcggctcattaagagggattgcccacgccggttttaatggaaataaacgagctgttattgcggcttcggatatgagaccgactcaattgcgtatcaatcatgtgctcaatcgctccccagacaacatccaagaagggaacgacatggaatgtgcttatttagatgaaaatgagaatatggtcattgaccgccttcagcaattagctcatttaagacctagtttaacaaggcttgagggaggaatgtaaaattgggtgaagctatcgtaataacctcggggaaaggcggagtaggcaaaacgacgacgtccgcaaatcttggcaccgccttggccattttggggaaacgggtatgtctcgttgacacggatatcggcctgcgcaatcttgatgttgtcatgggccttgaaaatagaatcatatatgatttggtggatgtcgttgaggaacgatgcaaaatccatcaggcgcttgtgaaagataagcgctttgatgatttgctttatttgctgccggccgctcagacaagcgataagtcggctgttttgcccgagcagatggtcaagctgatccagcagctcaaacaagacttcgactacattgtcattgactgccctgcagggattgagcaaggttataaaaatgcggtctcgggcgcagacaaggcgattgtcgtgacaacaccggaaatctccgctgttcgtgacgctgaccggatcatcggcctgcttgaaaaggaagaaaatattgagccgccgagacttgtcgtcaaccggatccgcaaccacttaatgaaaaacggcgatacgctggatgttgatgaagtcattcagcacttgtcgatcgaactgatcggtattgttgcggatgatgatgaagtgattaaagcttccaataacggggagcctgtcgtcatggacccgaataataaagcttcaatcgcataccggaacatcgcccgccgcgtgctgggcgaatctgtgcctttacagtcgtttgaagaagaaaataaaggcgttttcgcaaagattaaatcatttttcggcgtacgcgcttaactgcaaaaagcaatctccaaagcgagattgctttttttgcagttttattgatcgttttctactttatgctttagcaaggaaagcttattgtcccaatacatgtcgaagtaggcgagccactgctgcagctcggcgagaggttcgggatgaagcctgtacagtttttctctgcccgcttttctcccgctgactaggcctgcttcggacaaaactctgagatgctttgaaacagccgtccggctcatcgggaaatggctgctgatatctgtgacaggcaattctttgccggcgaggagctccagcatttttcgccgggagggatcggaaacggcttggaacacatcatgttttgcggcggatgtcactagccctcaactgcctgacgcagcttttgattgacgattgtttcccagccgccattcatccgattgcggacatccgcttgcttttctcccgcttttgaaaccgtttcttccggcgcaccccatcctgaatgaatcagggtaaattcggttttttctgcagaaagctctttcaattcaaatgtgacgatccatcccgacgtatcccagctgaaagcgagtcgatgcggcgcatcaagctcgatcactttgcacggggaggggccgaaaggagactgcagggtgaattcgcagccgatctccgggcggaaatcattaggcataaaccaggcggcgatgccttcactggtggcgacggcctcccacactttttctatcgatgcgtgaaaaacagcctgtttatgtatatcaggcactagttgattgctcataatagacctcctagaaaaaagtaaaaccaaatggtttcctttctattatatgaaaccttttagttttatgtcaatgttccgtcataattccctgggacaaggcatatcattgaacaaacgaacctgaatgtaaaggatgagggttatgagtcatagagcagatgggattcgaaaaagaatggccaggaaaagaaagcggaaaacaccggacaaacagcccttttcatcagacggcaaaaagcggccgctcaagccgcctgcatggacagccttttcggaagatgaaaaaggaggagacttccctccgcctgaaggaagttccctgctgataaacgggaagcacccgcttgtcaaggcggatgcgctcatcttgaaatgtcttctgtcggcatgccttgttcttgtgtccgccattgcctacaaaggccagtttgaacccgcaaaccaaatcaaaccggttatcagccaggtgtttactgaagagttccaatttgcggccctccagaattggtatgaatccaagttcggcgatcccctcgcattctttcagccgaaaggcgccaaaccgtccggccaggtcgaggtgaatcaggatctcgctgtacctgccgtaggaaaggttcaggagaaattctcagggcagggcattaaggtagaaacagaagacgaaacgatccgcagcatgaaggaaggctatgtcattgaagtggacaaaaatccggaaacaggcctgacggtggtcttgcagcatgcggacaacagctatacctactacggccagctgaaaaaagcggatgtcgctttatacgattatatagataaaggaacgaagctcggaacgattgagcaggataaaaatcaaaaaggcatctattactttgcgatcaaacaaggagaggaatttgttgatccgatacaggtgatcacatttgagtaaatggacggagctcttcaccaagcttcacattcatccgctgctgtggcttgtcatggcgatcggtatcatgacaggacatattaaagcgctgttttgtttaatgatcattattttgatccacgagcttggccacgctgctgctgccgtttatttttcatggagaattaaaggcattttcctgctgccttttggaggaacgctggaagtcgatgaacacggcaacagaccgttaaaggaagagcttgccgtcatcgccgcggggcctgttcagcacatttggcttcaatttgcagcctggcttttggcggtcaattcgctcatcagccctcatatatttgaaacgtttactttttacaatctgaccatcctcttgataaatctgtttcctatttggccgcttgacggcgggaagctgctgtttctgctgttttcaaaacaccttccgtatcagaaagcgcagcggatgatgctggctgtatcgtgcttttgctgcgctgttctaatcgcggcgactctgctggtctccccgtcgcagctgagcgcttgggtgcttctcgtatttttggctgcatccctttaccaggaatatcgcaatcggcattacgcccatatccgttttttgcttgagcgctactatggaaatgagagggaagtgcggcgactcgcaccgatcacggtgtgcgccgaacagcagatttatgaggtcatgctcatgtttaaaaggggctgcaaacacccgatcattattgagaaggacggacaaaaactgagccagctggatgaaaatgaagttctccacgcttattttacagacaagcgcacgacttcctcaatggaagatctgcttctggtttattgaccatccttctaaaagacattgacactcgggctcttttctggtatattttttaatgttatggatgtagcacccgtgctacaaccgctcagcacaggcgttaagtgctttcttagccccctgtgactggcgagtcttagtttattaggaggtgcagagatgtacgcaattattcaaacaggcggaaaacaaatcaaagttgaagaaggccaaactgtatacgtcgaaaagcttgctgctgaagccggcgaaacagttacttttgacaacgtattgtttgtcggcggtgaaaatgttaaagttggcagccctacggttgaaggtgctacggtaacaggcaaagttgaaaaacaaggccgcgctaaaaaaattaccgtatttaagtacaagccgaagaaaaaccaacacaaaaaacaaggtcatcgtcaaccttacactaaagttgttatcgaaaaaatcaacgcttaaggcgtgtatgatatgattcatgcaaagattacaagatcccgatcgaacaaagacatcttgggctttgaaatgtcgggacatgcgaattttgctgaacatggtcaggatctcgtttgcgcaggggcgtcggcggtcgcctttggagccgtcaatgccgtaatgaagctgacgggcattgagccggtcattgacctcggggaagacggcgggtttttatctttccgcttcccggacggtacggatcgtgaggcttttgaaaaggcgcagctccttctcgaaggcatgatcgtctcccttgacacgatcgaacgagactacaaaggttacttaaaagtaacgacgaacaaaatataggaggtgagctacatgctaagattagatcttcagttttttgcatctaaaaaaggagtaggttcaacgaaaaacggacgtgactctgaggcgaagcgcctaggtgctaaacgtgcagacggtcaattcgtatctggcggttcaatcctttatcgtcagcgcggaacaaaaatctatccaggtgaaaacgttgggcgcggcggagatgacactctatatgcaaaagtcgacggaactgttaaattcgaacgtttcggccgtaaccgcaaaaaagtgagcgtatatcctgtagcctaacctttaaacgaaactccggtcgttctgaccggagttttttacattcagcaccatgacttgcttaaaacaccttcccgacgcctaaataaggccgggtttccgctctgattctgcttcgttaaagtatataaacgtgtttcatttatactgccttctctgttataattcaaagtacaaactgaatcagactcctaaaagagagaccaaacgattgggagtgccaaaatggaagaaacttcgaaaaaacgagaaaagaatatggacgataaggctttgacccatgagcttatccatctgctcagccactcaaggcacgactggatgaataaactgcaattgattaaaggaaacttaacattaaaaaagtatgaccgcgtatttgaaattatcgatgaagtggtcatcgaagctcagcatgaatcaaagctttcaaaccttagaatcccgcgcgcggcgtatgagctgcttacatttaactggatggcccattcgctgacgcttgaatatgaggtgatcggtcaagtcaaggatttgtcagcttatgaagaaaggctcgtcgttctcatcagaaagctgtttgggatttttgacgatgccgttttgaaaggcagcgacaatcatctgacgatcacgctgcagacggacggtccggacgaccgcctcgtcatctttctcgatttccacggcgtattcacaaagctgaccggtatcaaagactttcatcattcactggccgacttttatgaaatcaagcggtttgatgtaacagaccgtgagtgcatcgccgaaattcatatcaagtaaagcggttttttaggaatagaacggaggacattatgtttgttgatcaggtgaaaatatacgtaaaaggcggagacggaggcaacggtatggttgctttccgccgcgaaaaatatgtgccaaaaggaggccctgccggaggtgacggcggaaaaggcggagacgtcgttttcaaagttgacgaaggtctcagcacgctgatggattttagatatcaaagacattttaaggcagcgcgcggagaacacggcatgtctaaaaaccagcacggccgaaatgccgaagacatggttgtgaaagtcccgcccggcacggttgtcattgacgatgatacaaaacaggtcatcgctgatttaacggagcacggacaggaagccgtcatcgcaaaagggggacgcggcggacggggcaatacacgttttgcgacgcctgccaacccggcgccgcagctttctgaaaacggcgaacccggcaaggagcgctatattgttctcgagctgaaagttttggcagatgtcggtcttgtcggcttcccaagcgtcggaaaatcaacgctcctgtctgtcgtgtcttcggccaagccgaaaattgccgattaccactttacaacgctgaacccgaatctcggaatggtcgaaacggaagacggccgcagctttgtaatggcggatcttccgggactgattgagggggcgcacgaaggagttggcctcggacaccaattcctcaggcatatcgaaagaacgcgcgtcatcgtgcacgttattgacatgtcgggtcttgaagggcgcgacccgtatgaagattatgtgaccattaataaagagcttgaacagtataatctcaggctgacagaacgtcctcaaattattgtcgccaataaaatggatatgccggatgcggaagaaaatctgaaggctttcaaagaaaagctcacagatgattatcctgtttttccaatcagcgcggtgaccagacaaggcttgagggatctgctgtttgaaattgccgaccgtttggaaacgacgccggaattcccgctctacgacgaagaagacatggctgaaaacagagtcatgtataagcttgaggatgaggaagcgccgtttgagatcagccgtgatcctgacggcaccttcgtgctcagcggagccaagcttgaacgcttatttaaaatgacggacttttcaagagatgagtctgttaagcgttttgccagacagcttcgcggaatgggcgtcgatgatgcgcttcgggcccgcggtgcaaaagacggggatacgatccgtcttctcgaatttgaatttgaatttatcgactgatcataccggagagtttgccaagcaagctctccgacttttagctgaaaggaacgcccttcctttcgcaggatcaatgtaaaggaatcagggtttttaaaaggagagaaaagtctgtgaaagaggagaccttttatcttgtcagggaagacgtgctgccggaggcaatgcggaaaacacttgaggtcaaaaagctgattgagcggaaaaaagcggaatctgtagctgaagccgtacaaaaggtagatttgagccgaagcgctttttataagtacagagatgcggtttttcctttttatacgatggtcaaggaacagattatcacgcttttttttcatttggaggaccgctcaggaacgctgtcccatctgctgcaagtggtagctgaatcgggctgcaatgtgctgtcgatccaccagaccatccctcttcaaggaagagcgaatgtcacgctctctgtcagtacgagaggcatggatgaaaatatcgatttgctgatgaacaaattaagaaagctggaattcgtagaaaaggtcgaaatactaggttcgggcgcttaagggagagaatgacatatatcatgagtatgagagtaggttatttaggtccagaagcaacttttacgcaccttgccgtctgctcctgcttttcagatgcagaccagcaagcatttaacacgataccggcctgcatggatgcggcgatgaacggggagatcgatctggctgtcgtcccgcttgaaaatgcgattgaaggatcggtgaatctgacaatagactacttaattcacgaacagcctctttatattgtcggagaaatcaccgctcccatccgtcagcatttgcttgtgcatcctaccagaaaagaggcttgggaagacattcagaaggtttattcccattcccatgccatcgcgcaatgccataaatttttgcacagccggttccgctccattccgtttgaatatgcgacatccaccggagcagctgcaaaatacgtgagcgaaaatccggaagagaacatcggcgtgatcgccaatgaaatggcagcagatacttacggattagacatcgtcaaaagagatgtgcatgactatgaatacaatcacacgagatttgtgatgcttcatccggatcgcgaggcatcccctccggtcaaccctcaactcaagggaagaccgaaaacgactttgctggtgacccttccttcggacagatcgggagctctccaccaagtgctgtcggctttcgcctggagaaatttgaatctttctaaaattgaatcgcggccgacaaaaaccggtctcggcaattatttcttcattattgatattgaaatggccctggatgacgtgctgattccaggtgcaatagctgagcttgaagctttgggctgcaaggtgaaaatgctcggtgcctacaacgcatatacactataaaagaaaggtcctttgcgctgataacggcaaaggaccttttcttttattcgggaatgaggatgcccgctttttgcagggcgccgcaagcttgttcgatcttctcttcatcatctgcctccaatgtgtggagatggatgccgtttgtcagctgagacagataagcggcgtttgtcgaagagatttttttgacgaaatccgcgacttcttttcttgtgctgaccctgatcgaagctgttaagtctccgtagaccggatgttcaatcgttacatctttaaccgttacgccaaagtcgacgatcagattcagctcttcttccgttttttcgggttcgtggtcacaggcgatgatccgctgaaccggctgttttttgccgagggctgaccgcaaatacatgtacccttggcttgttgcgatgatcggttcgttttttgcttttaataaagaaatatcctgtacgatgacctgccgtgaaacagatgctcttttggccagctcgcttcctgtaagcggagcctctgactccttcagccaagccagcagctgctggcgccgctcagctcccgtaagttttaatccgtctgtcaatccgatggtctcctttctcattcatcatatcttcaagaacgtccaacagcctatcaacatgttcgcttgtcgtatcgcatccgaatgaaatccggacgaattgaagcgcgagctccctagggatcaaaagggctttcatcgtattcgaaggctcatgatagcccgctgaacacgcgcttccggtagaaatgcaaattcctctccgattacattccagcatagtatattgtccttcaaaggaatgaaaaaaacaacctataatatgcggcagaacatgcgaatttgccgaatcgggcacagcaagggagacgggaagcttccggtcttttactccttccagaaaacctgcgcgcagctcctggaatttgagatgcgcggcatccatgcggtttattgtcgactctgcagcggtaatgaaagcgccgattccggggacattgacggtgccgcttttaaagccgttttcatgcaaagtgcccgggtagacgggtttccagtttacacccggccgaatatagacagccccaactccttttgggccgtatactttgtggcttgagaccgataaggcatcagcgccgagctcatcaatgcggaccggaatcttggcaaatgtctgtacgcagtcgctgtgcaagagcacgtcccgcttatgcaggtaagccgagagctttgccagaggctggatgacgcctgtttctgaattggcatgctgaatcgaaaccagacccgtatccgggcggaggtgccgttcaagtatatcccttgtaatgatgcctgaagcattcggcttcatcaagtcgacatcaaatcccagcatctcgagatgccgtttcaaaatatggatcgactgatgctccatttctgtcattaaaaagcgctttttcccggcgggaagtccatttaagatggagtgaatcgctaaaaagttggcttcggtgcctccgctcgtaaaataaacgccttcttcttctccggataaaagttctgccatcctttggcggcagcagcgcaaaatgttttcggctttccctcctgcatcgtgcagactgctcgaatttccgtatacgtctgtgctaagtttttgaaacgcgtccaaggcttcttttgatgccggtgtcgtcgctgcataatcaagataaatcacggcgctcgtctcccattctttataaaaaatacttgagtttattttatcgatgtgtaaatataggtgtcaagacacatgtaaacttacaggaggagtcgacatgtctcatcagacgattattgttgtcggagcaggtgccgcagcgttgtcttttgctgcatccattccgccgtcttatgaagtggttgtgatgacaaaagcatctgtaaaagacagcaattcaaccctcgctcagggaggaattgcatctgctgtattgcctcgcgattcctggtcgcttcatgcggacgacacgttgtatgccgggtgcggccacaatcaaatcgaagcggtccatgatgccattaaagacggacagcgccttgttgatgagctgatccttcagcatttcccttttgatactgacgaatcaggaaagctgagcctcggaaaagaaggcgcgcattcggtgaacagaattttgcatgccgggggagacgcaacaggacaggagttgatccggcacttaatcggacggctcggtccgcacgtcgtgctgaaagaatacgaaacggcggcggatttatggattgaagacggacgctgctgtggcgtctggacgaaagacagccgtgggaagacgtttctcagaaaagccgattttgtcgtgctggcggcaggaggctgcggaaatctatttcaaatcaacacgaataaccgttctgtgacaagcgatgcgatttctttggcgtatcgggcaggagcagagctcgcagacttggaattcgttcaatttcatcctacattgcttgtcaaagacgggcgcgcgcacggacttgtttcagaagctgtgcgcggagaaggtgctgtgttgattgatgaaaacggacagcgggtgatggaaggcatacattctttgctggatttagcgccgcgggacgttgtatctcgggcgatacaccaaaagcttgcctgcggaagcagcgtatttttagatatttcccgcatatcagactttaaaagccgcttccctacgatttcttctctttgcgaaaaagccggtatttccattgaagagggccggattccggtttcaccgggcatgcattttttaatggggggcgtttctgtgaataaatggggagaaacggctgttccaaacctttttgtgatcggggaagccgcttgcaccggctttcacggtgccaaccgtctggcaagcaattctctcttggaatgcatcgtcttcggaaggagagcggcggagcggattcaagcctgccaaaaaccggagcctgtcagaggccaatctcctcagcctgagaatgtgacgtattctgttcctttgacagatgtgaaggatattcagaaacaaatgacagattatgcggcgatcgtgcggacggaggatgaattgacgaaggtgaaagaatggcttgagcgaatgccggttcaaatcgtaaatgtgaaagaaatcacaatagaacagctcgagctagctcatttatggcagactgccaaacagatgacggcctcggcactgcttcgtacagaaagcaggggcggccattaccgttcggattgtccggcgcctgatgataaaaactggcacggcaagcaaatcgttcacacaaaaggcgggatcaagatcagacaaaacgaagggattgtgaaatatgcagcggttcatacttaggaacatgcttaaggaatttttcaaggaagatatcggccggggggatctcacttcagaagccgtttttgatgacaatcatcaatgcgaagctgtcatcacagcgaaggatgacggcttgtttgcaggagaattagtgattctggaaggctttcggctgcttgatgaaacgatcgccgtccacatgctgaaaacagatggcgaagcggttcgtaaaggggaaacgatcgcgcgactcaaaggccgtgcagcttccctcatgaccggtgaacgggttgtgctgaatctcattcaaagaatgtccgggatcgccacattaacaaagcagtccattatcaggctgaatgatccgaatatcgcgatttgcgatacgagaaagacgaccccgggcctgcgcatccttgaaaaatacgcggtcaaaaccggcgggggcagcaatcaccgctttggattggacggcggcatcatgattaaagacaaccatattgccgcctgcggctcgatttcaaaagcggttgaaaaagcgcggtcagcgtgcggccatatggtcaagatcgaagtggagatcgaatctgaacaagagcttcatgaagcgattgaggccggcgccgatatcattatgttcgacaattgcccgcccgagacggtgaaagcatttgctgaaatgacacccgccggcattataacggaggcttcaggcggaatttcatttgaaaatctccccgcttacaggggaacaggggtgcactgtatttcattgggctacttgactcattcggcgaaaagccttgatatcagcatgaatgttgatctgaaaaaataagcgggattggagagggtacagatgtctattttaaaagtgattcatgacaggaacgccggcatgatgccggaggtgtataaagaattgactgaggaagaaatggccggaaggattttgaaaatcaaaaagaaattcggagcaaggctgtttatcccggggcatcactaccaaaaagacgaagtgattcaatttgcggacgcgacgggcgattcgctccagctggcacaggtcgcccaaaaaaataaaaaagcggaatatatcgtgttctgcggcgtacattttatggcggaaacagccgatatgctcacttcggacgaacagattgtcgttttgccggacatgcgcgcaggctgttcgatggccgatatggccaatatgcggcagacaaatcgcgcctgggaagagctgacgaagctgtttggcgatacggtcattcccctcacatatgtcaattcgacagctgaaattaaggcttttgtgggaagaaacggaggagcgtccgtgacatcctcaaatgcggcgcgcatgttgacatgggcgctatcgcaaaaggagaggattttatttcttccggatcagcacttgggacgcaacacggcatttgacctcggcattcctctaagcaggatggcggtatgggatccaattgcagaaaaacttgagtataacggcgatatgaaagacataataatcattttgtggaaggggcattgttcagttcacgaaaaatttaccgtggcgaatatcaaaagtgttaaagagcgggatccggacatcaatgttatcgttcatccggaatgcacccacgaagtcgttgcgctcagcgatttcagcggatctacaaaaaaaatcatcgactccattaatgaagcaaaaccggggagcaaatgggcgattggaacagagatgaaccttgtttcacgcatcattcaagaacatcctgataaacaaatcgaatcccttaaccctgatatgtgttcttgtttgacaatgaacagaatcgacatgccgcatttgctgtggtcgctggagcagatcgacaaaggtgaaccgacaggcgtgatcaaagtggatcaagatattgcaaaagatgccattcttgcgctgaatcggatgttaacgatccgttaactttttggagaacaagtttttatcataacccctccgctatgcgcataaatttgtggagaagcatatttgttattctcatctgttcgttcacgtttttgcataggaggggaaaacgttgaaaattcatattgtccaaaagggcgattctctggaaaaaatcgcggaaagatatgaagtggactttgaagaactgaaaaagctgaattcgcagctgagcaatccagacttgatcatgccgggcatgaaaatcaaagtaccgtcagggggagtgccggtcaaaaaagaagaacagctcaatatgcgaaaggaattaccgaaaaaacagcaggaacatccatttgcaaaagaaaagccgaaaagcaagcttgatgttgaagatataaaaccgaaagaaaagccttcggttccttatgttccgcctgtcccgaacatcggacaatcaagtttgcctgaaggcgacatttcgaatttgtatcaaagcgtcaatcagcttcatcagccgtacgtacctccaaaaccttatgaacatcaagagaaaggccccaacatgtataatccatggacaaatgaggaggaaaaccatatggaaaatgtcaattatccgaatgttccgcagccgccaaatgtcggtgcagcaggtgatgaaaataagcagtttcacggcatgccgaatgtagctgcagcgggatatcatcaccatccatatccttatccgttctatcctggaggctgctggattcctgtttcaccggtgctgcctggatcgggattttgccatccttggtatccatatcctgctcaaatgccttatatgcatcagcctagctatgtatctcctgctgaatatgacgatgatgacaacatggggcatgacaatgccggtcatcacggataccatcatcagccgatgactgccccggcatatgcgccttaccagccgttcccgggatttgcaccgccaaacgtcggtcacgccggggaccctaatatggcacacggcaaagaagatgactgcgggtgcgggccgggccaattcccgggaggttttccaggtgcggcgccatatggacagatgccgcaaatgggagctccgtacggtatggggggatacggacagcagcctgcagggggacagatgtttaacagaccggaagatgatgaagactgattcggaatgggacgatgatctatcgttccttttttattgtggaccgctataaacattttcatgctatttaacgggaatgtctataactgtcaagggtaactcttcgcatcccgcacatcctaaaaaagagcgcaatgctcaaattcagcggttttcacggggggtactaccattggacagcaagctgaaagtgttttcggggattttgcttttgacagcaggtctatctgcatgcggaacgaacgacgctatagataatggaaacaatacgcgcccgatcggatattattcaaatgatgcagatcgtaatgcaggtcttgataatgacggtcctgttacagaaatgcttgaaaacatgaacgggagaaacggtgcaacaaacgtaaacaatcgagcgggcaacggcaatcccgttccaacaggcgatggaacttacagccggggagacatgaattatcacaaccatttggtgaatacggcggatacaggctatgacagaccggaaaaccgtaaaatctcaaggaatatcactgggcgcgtcaacaaattgaattatgttgacgaaagccaggcagtcgtaacgaatgaaacggtcatcatcgccgtacggtctgataaaaggctgacaaataacgagagaactcaaattagaaaagcagccaaaacatttgccggagaccggaccgttcaagttgtcgaggacgacggcgcatttacaaggctgcgcgaaatgaacgatgatcctcagaacattagggatcgcggagacacgacgaataacaatttgaaccgcttgcggaaccaataacaagcagggaattgccggggattccccggcaattttttataagcgctcggccgattcctttacaaaaacggggaaaaccgtataaagtgtacatagagacgagaattattttggaggtagaaagttatggctggccattctaaatggaaaaatattcagagacgaaaaaatgcccaagatgctaaacgcggcaaaattttcatgaagcttgccaaagaaatatatgtagccgcgaaagaagggggaccagatcccgaatctaacgcaagtctgcgtctcgtcatcgataaagccaaaaatgcaaacatgccaaatgacaacatcgaccgcgccatcaaaaaagcttccggcagccaggatggaaaaagctatgaggaaattacgtatgagggctacggaccaagcggtgtggctgtcatggtcaaatgtttgacagataataaaaaccggacggcgacaagcgtcagaaccgctttcagcaaaaacggcggcagcttgggagaaacaggatgcgtttcttatatgttcgaccggaaaggatatattgcaatcgaacgtgaagatcttgagatagatgaagaagagtttatgcttgaggtcattgatgccggtgctgaggagcttgaaacgagcgaagagctgttcgagatttatacagagcccgaacagtttgaagaagtgaagaaaagcttggaggagcgcggctacaagctggcaacatccgaaattacaatggttccgcaaacctatgcagaagtcgatgaagcgcttcaggaaaaagtcgaaaagctcattgacgtgcttgaagatgatgacgatgtgcaggaagtgtatacgaacgttcattaaagaaaagggcgccgctcaagattagcggtgtccttttatgcttcatcaaaccatttagcagccgtatcaagctccagcggaaacatgatttgatttttgatcatatattgtgaaggaatctgtcatctatgagaggaggatctataaatggctgaacagcaaggaaatgagaagcctttcacggctatgggcgccggtgcgcaagatcaggaaaccgctcaaatcatcgagagagtcggcagccttatcaccggatttggcgaatccatctatgagctggtacagaaaaacagcggcatcgatctgagagaggctgacttcacaaaaagcgagaatgcggaactgaatcaagcgatccaaaatattatcagcgaatacattcaaaatctcaacaatctgaatgccgatctcagcggaaagatcggtgaatcgatccaaggcatcgtcacaagcaaagatcaaaaagacgcttaaatattggacagcatgataatattgtcggcaaagctgcattcagccttgtcgacaagttttttttatacatacgaaaattttgctgtaacggtcaaatgctttttttcatcccgcagcgccggcattcgcgcaaaaactgcccgtttttcacagagcttttaaaaagggtgtaatcgcaattgtcgcaccgtccgtggcggacatccaaatattgattgtaatcataaacttttgtcaggtcgtagccttttgtttcatattctgtttccatgttttatcacctgcacttttattgtcggttataggataacagaacgggggagaaaagaaaatataacatctgccggtggcggccgcagatgattctcacttttatcaaaccgtataccccgttcctgatagaatgcttcattctcaagctggatgggcttttgggaaaaacctgcaaccagaggagcccattcttatgagattttcttcttaaaatttatcgatcttttaaactaaagaaaaagtattgttttaataaaaatatttaaatttttattttttatcaaacttattcataattgaacgcgtcatgtctaaagcgtaaaataaatgtgtcacaaaaaagccaaatatacaatgaggcatggaggacatgcctataaatcgaaaggtagtgtaaaaggggaataaccaatgaagaaaaaagtactcatctacttggtgatcgcagcagtgatgataaatggtgtatacaggtggtccgaaaaaacaacccgggaaagctatcagatccaggccggggacaaatacaagaacttcaaggaattgcaggaaaacgaaaaaagcggctatgacattgattatcacgaaaaagcgggaagcgactgtttaatcttttcgccccatggaggaagaatagaaggcggagtgagcgagcttgtccgagcttttaatgatgattattcaacttatttattcgaaggaaaaaa
